(19) United States
(12) Patent Application Publication
(10) Pub. No.: US 2004/0102412 A1
(43) Pub. Date: May 27, 2004

(54) Antisense modulation of GFAT expression

(76) Inventors: Kay O. Broschat, St. Louis, MO (US); Seth D. Crosby, St. Charles, MO (US)

Correspondence Address: Pharmacia Corporation, Global Patent Department, Mail Zone MC5, P. O. Box 1027, St. Louis, MO, 63141, US

(21) Appl. No.: 10/688,706

(22) Filed: Oct. 17, 2003

Related U.S. Application Data
(60) Provisional application No. 60/419,268, filed on Oct. 17, 2002.

(51) Int. Cl. A61K 48/00; C07H 21/04

(52) U.S. Cl. 514/44; 536/23.2

(57) ABSTRACT

Antisense compounds, compositions, and methods are provided for modulating the expression of Glutamine-fructose-6-phosphate amidotransferase (GFAT). The compositions comprise antisense compounds, particularly antisense oligonucleotides, targeted to nucleic acids encoding GFAT. Methods of using these compounds for modulation of GFAT expression and for treatment of diseases associated with expression of GFAT are provided.

[0001] The present application claims priority under Title 35, United States Code, §119 to U.S. Provisional application Serial No. 60/419,268, filed Oct. 17, 2002, which is incorporated by reference in its entirety as if written herein.

### FIELD OF THE INVENTION

[0002] The present invention provides compositions and methods for modulating the expression of Glutamine-fructose-6-phosphate amidotransferase (GFAT). In particular, this invention relates to antisense compounds, particularly oligonucleotides, specifically hybridizable with nucleic acids encoding Glutamine-fructose-6-phosphate amidotransferase. Such oligonucleotides have been shown to modulate the expression of Glutamine-fructose-6-phosphate amidotransferase.

### BACKGROUND OF THE INVENTION

[0003] Type 2 diabetes is a metabolic disease linked to obesity in the adult population. The growing incidence ranks Type 2 diabetes as one of the fastest growing diseases (40.3 million in 2000 global clinical incidence, annual growth rate of +4.9%). Yet, diabetes is neither adequately diagnosed (64% of the affected population diagnosed) nor treated. Current therapeutics for the treatment of Type 2 diabetes include insulin replacement, insulin secretagogues and insulin sensitizers. Despite introduction of the PPARgamma agonists, which improve insulin action in both liver and peripheral tissues, clinical experience demonstrates that plasma glucose levels of the treated population remain significantly above the non-diabetic level. Each of the currently available therapies has significant side effects. Hyperglycemia and poor glycemic control promote diabetic complications such as retinopathy, neuropathy, nephropathy, and increased risk of cardiovascular disease. Therapeutic agents which act at the fundamental defect(s) leading to insulin resistance should be more capable of normalizing blood glucose and providing disease modification. No disease modifying agents have been registered for clinical use to date.

[0004] It is now well established that abnormalities in insulin sensitive mechanisms and reduced secretion of insulin are causes of insufficient insulin activity in Type 2 diabetes. Insulin resistance is evident in patients prior to the onset of frank diabetes, which is diagnosed by elevated fasting blood glucose and a rise in HbA1c levels, indicating poor glycemic control. With recent advances in molecular biology, the cellular and molecular mechanisms underlying insulin resistance such as the insulin receptor structure and the mechanism of signal transduction downstream of the receptor have been investigated in detail. During the last decade, glucose transporter genes have been cloned and the relationship between mutations in the genes and the process of diabetes has been studied. However, the insulin, glucokinase, and mitochondrial gene abnormalities so far elucidated, taken together, account for not more than 1% of diabetes cases. While other gene abnormalities are to be revealed in the future, the environment and life style appear to be predominant drivers for a large percentage of the Type 2 diabetes cases. The correlation of diabetes with obesity, excessive nutrient availability and the lack of exercise has been amply documented as a primary cause of insulin resistance and progression to Type 2 diabetes. The ability to treat Type 2 diabetes by diet, exercise, and weight loss demonstrates the contribution of these causal factors. However, poor patient compliance and an inability to modify diet, reduce weight, or increase activity levels accounts for the high percentage of Type 2 diabetics who cannot control their diabetes without therapeutic intervention.

[0005] Current therapeutics for the treatment of Type 2 diabetes include insulin replacement, insulin secretagogues and insulin sensitizers. Despite introduction of the PPARgamma agonists, which improve insulin action in both liver and peripheral tissues, clinical experience demonstrates that plasma glucose levels of the treated population remain significantly above the non-diabetic level. Moreover, each of the currently available therapies has significant side effects including weight gain, dose-limiting edema, and potential for hepatic toxicity. Furthermore, attempts at second-generation PPARgamma agonist that include PPARalpha activation (e.g., JTT-501, NN6222) have met with difficulties that have precluded clinical development. In recent years, antidiabetic agents quite differing from the conventional oral hypoglycemic agents in the mechanism of action, such as the α-glycosidase inhibitors acarbose and voglibose (Diabetes Frontier, 3, 557-564 (1992); Drugs, 46, 1025-1054 (1994); Igaku no Ayumi, 149, 591-618 (1989); Rinsho to Kenkyu (Japan. J. Clinics Exper. Med.), 67, 219-233 (1990); Rinsho to Kenkyu, 69, 919-932 (1992); Rinshoi (Clinical Medicine), 21 (supplement), 578-587 (1995)) and the insulin resistance improving agents, troglitazone and pioglitazone, (Diabetes, 37, 1549-1558 (1998); Rinsho lyaku, 9 (supplement 3), 127-150 (1993); New Engl. J. Med., 331, 1188-1193 (1994); Atarashii Tonyobyo Chiryoyaku (New Antidiabetics) (edited by Yoshio Goto), published by Iyaku Journal Co., Osaka, (1994)) have been developed. Meanwhile, in the United States, a biguanide derivative was approved in 1996 as an antidiabetic for general prescription (New Engl. J. Med., 333, 541-549 (1995); Diabetes Spectrum, 8, 194-197 (1995)). The above-mentioned drugs, unlike sulfonylureas (SUs), which have been used for many years in routine medical care, produce a hypoglycemic effect without promoting insulin secretion from β cells of the pancreas.

[0006] It is considered, at present, that there are nine mechanisms through which antidiabetics might be able to improve insulin resistance as follows: (1) activation of insulin receptor kinase, (2) promotion of translocation of glucose transporters, (3) correction of the action of the rate-limiting enzyme involved in glucose metabolism and correction of abnormalities in glucose metabolism, (4) inhibition of gluconeogenesis in liver, (5) promotion of glucose uptake by liver, (6) enhancement of glycogenesis in liver, (7) reduction in blood lipid level, (8) decrease in gluconeogenesis in liver as resulting from the reduction in blood lipid level, and (9) enhancement of insulin sensitivity as resulting from the reduction in blood lipid level.

[0007] A growing body of data implicates the hexosamine pathway as a primary energy sensor in mammals, and demonstrates that an increased rate of hexosamine biosynthesis produces profound insulin resistance. GFAT is an important enzyme catalyzing the conversion of fructose-6-phosphate to glucosamine-6-phosphate, which is the rate-limiting step in the hexosamine biosynthesis pathway. Inhibitors of GFAT activity are thought to promote glucose influx by cells and thereby reducing the blood glucose level. Therefore, these inhibitors are expected to be of use as antidiabetics. Their mechanism of action is thought to be associated with the process (2) or (5) mentioned above.

[0008] While the hexosamine biosynthesis pathway metabolizes glucosamine-6-phosphate to UDP-N-acetylglucosamine, CMP-N-acetylneuraminic acid, etc., those metabolic intermediates are thought to be utilized as precursors for glycosylation of proteins or as essential substrates for the synthesis of proteoglycans and gangliosides.

[0009] Insulin activates its signal transduction pathway through binding insulin receptor and translocates glucose transporters (GLUT4 etc.) pooled within cells to the cell membrane resulting in increasing glucose influx. Glucose is metabolized by glycolysis pathway and ATP is accumulated as an energy source. When the influx of glucose is excessive, however, or when glucose metabolism is diverted away from the glycolytic enzyme phosphofructokinase and into the hexosamine biosynthetic pathway, increased fructose-6-phosphate enters the hexosamine biosynthesis pathway and is converted to glucosamine-6-phosphate catalyzed by GFAT. Physiological increases in the rate of GFAT biosynthesis of glucosamine-6-phosphate results in an accumulation of the pathway end-product, UDP-N-acetylglucosamine. Although detailed mechanisms remain unknown, several observations indicate that metabolites of glucosamine-6-phosphate prevent glucose transporters from translocating to cell membrane, resulting in reducing cellular glucose influx (FASEB J., 5, 3031-3036 (1991); Diabetologia, 38, 518-524 (1995); J. Biol. Chem., 266, 10115-10161 (1991): J. Biol. Chem., 266, 4706-4712 (1991); Endocrinology, 136, 2809-2816 (1995)).

[0010] Therefore, the hexosamine biosynthesis pathway is considered to control the influx of glucose by a feed-back manner. GFAT is the rate-limiting enzyme in this pathway. GFAT activity is also known to be generally high in patients with Type 2 diabetes and is considered to be one of the causes of high blood glucose levels (Diabetes, 45, 302-307 (1996)).

[0011] Hypoglycemic agents, such as inhibitors of GFAT activity, whose action is mainly directed to some other tissues than pancreas invariably, improve insulin resistance in target tissues. These agents have some clinical merits in addition to their hypoglycemic activity, because of their secondary effects. When used in combination with other drugs, they are highly effective and have very bright prospects before them.

[0012] Recently a human GFAT-1 gene has been cloned (J. Biol. Chem., 267, 25208-25212 (1992)). The gene product is a 77 kDa protein composed of 681 amino acid residues. GFAT-1 genes have been cloned from other animal species as well. For example, a murine GFAT-1 is highly homologous to the human GFAT-1 (91% at the nucleotide level and 98.6% at the amino acid level), hence it is considered to be the counterpart of the human GFAT-1 (Gene, 140, 289-290 (1994)). In addition, a yeast GFAT-1 (J. Biol. Chem., 264, 8753-8758 (1989)) and a Escherichia coli-derived GFAT (Biochem. J., 224, 779-815 (1984)) have also been reported, each having high homology with the human GFAT.

[0013] Recently human and mouse full-length cDNAs of a novel subtype of GFAT which was designated GFAT-2 (the previously reported GFAT was named GFAT-1) has been cloned. Both the human and the mouse GFAT-2 proteins are composed of 682 amino acids of approximately 77.0 kDa. At the amino acid level, homologies between the human GFAT-1 and GFAT-2, between the mouse GFAT-1 and GFAT-2, and between the human GFAT-2 and the mouse GFAT-2 were 75.6, 74.7, and 97.2%, respectively. GFAT-1 is more highly expressed in the placenta, pancreas, and testis than GFAT-2; GFAT-2 was expressed throughout the central nervous system, especially in the spinal cord, but GFAT-1 expression was weak. The locus was mapped to human chromosome 5q and mouse chromosome 11, where a synteny between the two species has been known.

[0014] GFAT-1 is ubiquitous, whereas GFAT-2 is expressed mainly in the central nervous system. In the course of developing a competitive reverse transcriptase-polymerase chain reaction assay, we noted that GFAT-1 cDNA from muscle but not from other tissues migrated as a doublet. Subsequent cloning and sequencing revealed two GFAT-1 mRNAs in both mouse and human skeletal muscles. The novel GFAT-1 mRNA (GFAT-1Alt [muscle selective variant of GFAT-1]) is likely a splice variant. It is identical to GFAT-1 except for a 48 or 54 bp insert in the mouse and human, respectively, at nucleotide position 686 of the coding sequence, resulting in a 16 or 18 amino acid insert at position 229 of the protein. GFAT-1Alt is the predominant GFAT-1 mRNA in mouse hindlimb muscle, is weakly expressed in the heart, and is undetectable in the brain, liver, kidney, lung, intestine, spleen, and 3T3-L1 adipocytes. In humans, it is strongly expressed in skeletal muscle but not in the brain. GFAT-1 and GFAT-1Alt expressed by recombinant adenovirus infection in COS-7 cells displayed robust enzyme activity and kinetic differences. The apparent K(m) of GFAT-1Alt for fructose-6-phosphate was approximately twofold higher than that of GFAT-1, whereas K(i) for UDP-N-acetylglucosamine was approximately fivefold lower. Muscle insulin resistance is a hallmark and predictor of type 2 diabetes. Variations in the expression of GFAT isoforms in muscle may contribute to predisposition to insulin resistance.

[0015] Evidence has accumulated that glucose flux through the hexosamine biosynthetic pathway may provide a nutrient-sensing hyperglycosylation that is responsible for glucose-induced insulin resistance (Rossetti, L. (2000) Endocrinology 141, 1922-1925). For example, it has been reported that targeted overexpression of the rate-limiting enzyme for hexosamine synthesis in the striated muscle and fat of transgenic mice leads to insulin resistance (Hebert, L. F. J., et al., (1996) J. Clin. Invest. 98, 930-936). This insulin resistance was phenotypically similar to that observed in human type 2 diabetes. Specifically, the insulin resistance was characterized by decreased insulin-dependent recruitment of GLUT4 to the plasma membrane and was reversed by the thiazolidinedione antidiabetic drug troglitazone (Cooksey, R. C., et al., (1999) Endocrinology 140, 1151-1157). Significantly, glucose also up-regulates the ob gene via the hexosamine pathway, which leads to enhanced leptin expression (Wang, J., et al., (1998) Nature (London) 393, 684-688; McClain, D. A., et al., (2000) Endocronology 141, 1999-2002). Insulin resistance caused by free fatty acids has also been suggested to be sensed through the hexosamine pathway (Hawkins, M., et al., (1997) J. Clin. Invest. 99, 2173-2282). These data support the function of the hexosamine biosynthetic pathway as a central nutrient sensor for both glucose and free fatty acids.

[0016] How the products of the hexosamine pathway might exert nutrient sensing or regulate signal transduction is not known. A leading hypothesis suggests that the terminal metabolite of the pathway, UDP-GlcNAc, is used as a substrate by the recently cloned O-linked GlcNAc transferase (OGT) (Lubas, W. A., (1997) J. Biol. Chem. 272, 9316-9324; Kreppel, L. K., et al., (1997) J. Biol. Chem. 272, 9308-9315; Hanover, J. A. (2001) FASEB J. 15, 1865-1876; Wells, L., et al., (2001) Science 291, 2376-2378). O-linked glycosylation by GlcNAc modifies the serine and threonine residues of cytosolic and nuclear proteins and, like phosphorylation, can change the function of such proteins as Sp1 and endothelial nitrogen oxide synthase (Yang, X., et al., (2001) Proc. Natl. Acad. Sci. USA 98, 6611-6616; Du, X. L., et al., (2001) J. Clin. Invest. 108, 1341-1348).

[0017] Antisense technology is emerging as an effective means for reducing the expression of specific gene products and may therefore prove to be uniquely useful in a number of therapeutic, diagnostic, and research applications for the modulation of GFAT expression. Systemically administered antisense has been shown to accumulate and have its effect predominately in liver and to a lessor extent in fat (R. S. Geary, et al., Curr.Opin.Investig.Drugs Volume 2, Issue 4, pp. 562-573). It would be useful to modulate GFAT-1 expression in liver and fat, making these two insulin target organs more insulin sensitive and thus attenuating the severity of diabetes. If in the future it becomes possible to deliver antisense to striated muscle, another insulin sensitive tissue, modulation of GFAT-1Alt may provide additional benefit in the treatment of diabetic hyperglycemia.

### SUMMARY OF THE INVENTION

[0018] The present invention is directed to antisense compounds, particularly oligonucleotides, which are targeted to a nucleic acid encoding glutamine-fructose-6-phosphate amidotransferase (GFAT or GFA), also referred to as glutamine-fructose-6-phosphate transaminase (GFPT), Glucosamine-fructose-6-phosphate aminotransferase [isomerizing] 1 (EC 2.6.1.16), Hexosephosphate aminotransferase 1, D-fructose-6-phosphate amidotransferase, which modulate the expression of GFAT. Pharmaceutical and other compositions comprising the antisense compounds of the invention are also provided. Further provided are methods of modulating the expression of GFAT in cells or tissues comprising contacting said cells or tissues with one or more of the antisense compounds or compositions of the invention. Further provided are methods of treating an animal, particularly a human, suspected of having or being prone to a disease or condition associated with expression of GFAT by administering a therapeutically or prophylactically effective amount of one or more of the antisense compounds or compositions of the invention.

### BRIEF DESCRIPTION OF THE FIGURES

[0019] FIG. 1 shows the human GFAT-1 amino acid sequence and the nucleic acid encoding such (GenBank accession number NM_{—}002056).

### DETAILED DESCRIPTION OF THE INVENTION

[0020] The present invention employs oligomeric antisense compounds, particularly oligonucleotides, for use in modulating the function of nucleic acid molecules encoding GFAT, ultimately modulating the amount of GFAT produced. This is accomplished by providing antisense compounds, which specifically hybridize with one or more nucleic acids encoding GFAT. As used herein, “GFAT” includes glutamine-fructose-6-phosphate aminotransferase 1 (GFAT-1) (J. Biol. Chem., 267, 25208-25212 (1992)), glutamine-fructose-6-phosphate aminotransferase 1 Alt (GFAT-1Alt) (DeHaven et. al. Diabetes 2001 November, 50(11):2419-24) and glutamine-fructose-6-phosphate aminotransferase 2 (GFAT-2) (WO 00/37617). In a preferred embodiment the oligomeric antisense oligonucleotides modulate the function of nucleic acid molecules encoding human GFAT-1. As used herein, the terms “target nucleic acid” and “nucleic acid encoding GFAT” encompass DNA encoding GFAT, RNA (including pre-mRNA and mRNA) transcribed from such DNA, and also cDNA derived from such RNA. The specific hybridization of an oligomeric compound with its target nucleic acid interferes with the normal function of the nucleic acid. This modulation of function of a target nucleic acid by compounds, which specifically hybridize to it, is generally referred to as “antisense”. The functions of DNA to be interfered with include replication and transcription. The functions of RNA to be interfered with include all vital functions such as, for example, translocation of the RNA to the site of protein translation, translation of protein from the RNA, splicing of the RNA to yield one or more mRNA species, and catalytic activity which may be engaged in or facilitated by the RNA. The overall effect of such interference with target nucleic acid function is modulation of the expression of GFAT. In the context of the present invention, “modulation” means either an increase (stimulation) or a decrease (inhibition) in the expression of a gene. In the context of the present invention, inhibition is the preferred form of modulation, of gene expression and mRNA is a preferred target.

[0021] It is preferred to target specific nucleic acids for antisense. “Targeting” an antisense compound to a particular nucleic acid, in the context of this invention, is a multistep process. The process usually begins with the identification of a nucleic acid sequence whose function is to be modulated. This may be, for example, a cellular gene (or mRNA transcribed from the gene) whose expression is associated with a particular disorder or disease state, or a nucleic acid molecule from an infectious agent. In the present invention, the target is a nucleic acid molecule encoding GFAT. The targeting process also includes determination of a site or sites within this gene for the antisense interaction to occur such that the desired effect, e.g., detection or modulation of expression of the protein, will result. Within the context of the present invention, a preferred intragenic site is the region encompassing the translation initiation or termination codon of the open reading frame (ORF) of the gene. Since, as is known in the art, the translation initiation codon is typically 5′-AUG (in transcribed mRNA molecules; 5′-ATG in the corresponding DNA molecule), the translation initiation codon is also referred to as the “AUG codon,” the “start codon” or the “AUG start codon”. A minority of genes have a translation initiation codon having the RNA sequence 5′-GUG, 5′-UUG or 5′-CUG, and 5′-AUA, 5′-ACG and 5′-CUG have been shown to function in vivo. Thus, the terms “translation initiation codon” and “start codon” can encompass many codon sequences, even though the initiator amino acid in each instance is typically methionine (in eukaryotes) or formylmethionine (in prokaryotes). It is also known in the art that eukaryotic and prokaryotic genes may have two or more alternative start codons, any one of which may be preferentially utilized for translation initiation in a particular cell type or tissue, or under a particular set of conditions. In the context of the invention, “start codon” and “translation initiation codon” refer to the codon or codons that are used in vivo to initiate translation of an mRNA molecule transcribed from a gene encoding GFAT, regardless of the sequence(s) of such codons.

[0022] It is also known in the art that a translation termination codon (or “stop codon”) of a gene may have one of three sequences, i.e. 5′-UAA, 5′-UAG and 5′-UGA (the corresponding DNA sequences are 5′-TAA, 5′-TAG and 5′-TGA, respectively). The terms “start codon region” and “translation initiation codon region” refer to a portion of such an mRNA or gene that encompasses from about 25 to about 50 contiguous nucleotides in either direction (i.e., 5′ or 3′) from a translation initiation codon. Similarly, the terms “stop codon region” and “translation termination codon region” refer to a portion of such an mRNA or gene that encompasses from about 25 to about 50 contiguous nucleotides in either direction (i.e., 5′ or 3′) from a translation termination codon.

[0023] The open reading frame (ORF) or “coding region,” which is known in the art to refer to the region between the translation initiation codon and the translation termination codon, is also a region which may be targeted effectively. Other target regions include the 5′ untranslated region (5′UTR), known in the art to refer to the portion of an mRNA in the 5′ direction from the translation initiation codon, and thus including nucleotides between the 5′ cap site and the translation initiation codon of an mRNA or corresponding nucleotides on the gene, and the 3′ untranslated region (3′UTR), known in the art to refer to the portion of an mRNA in the 3′ direction from the translation termination codon, and thus including nucleotides between the translation termination codon and 3′ end of an mRNA or corresponding nucleotides on the gene. The 5′ cap of an mRNA comprises an N7-methylated guanosine residue joined to the 5′-most residue of the mRNA via a 5′-5′ triphosphate linkage. The 5′ cap region of an mRNA is considered to include the 5′ cap structure itself as well as the first 50 nucleotides adjacent to the cap. The 5′ cap region may also be a preferred target region.

[0024] Although some eukaryotic mRNA transcripts are directly translated, many contain one or more regions, known as “introns,” which are excised from a transcript before it is translated. The remaining (and therefore translated) regions are known as “exons” and are spliced together to form a continuous mRNA sequence. mRNA splice sites, i.e., intron-exon junctions, may also be preferred target regions, and are particularly useful in situations where aberrant splicing is implicated in disease, or where an overproduction of a particular mRNA splice product is implicated in disease. Aberrant fusion junctions due to rearrangements or deletions are also preferred targets. It has also been found that introns can also be effective, and therefore preferred, target regions for antisense compounds targeted, for example, to DNA or pre-mRNA.

[0025] Once one or more target sites have been identified, oligonucleotides are chosen which are sufficiently complementary to the target, i.e., hybridize sufficiently well and with sufficient specificity, to give the desired effect.

[0026] In the context of this invention, “hybridization” means hydrogen bonding, which may be Watson-Crick, Hoogsteen or reversed Hoogsteen hydrogen bonding, between complementary nucleoside or nucleotide bases. For example, adenine and thymine are complementary nucleobases, which pair through the formation of hydrogen bonds. “Complementary,” as used herein, refers to the capacity for precise pairing between two nucleotides. For example, if a nucleotide at a certain position of an oligonucleotide is capable of hydrogen bonding with a nucleotide at the same position of a DNA or RNA molecule, then the oligonucleotide and the DNA or RNA are considered to be complementary to each other at that position. The oligonucleotide and the DNA or RNA are complementary to each other when a sufficient number of corresponding positions in each molecule are occupied by nucleotides which can hydrogen bond with each other. Thus, “specifically hybridizable” and “complementary” are terms which are used to indicate a sufficient degree of complementarity or precise pairing such that stable and specific binding occurs between the oligonucleotide and the DNA or RNA target. It is understood in the art that the sequence of an antisense compound need not be 100% complementary to that of its target nucleic acid to be specifically hybridizable. An antisense compound is specifically hybridizable when binding of the compound to the target DNA or RNA molecule interferes with the normal function of the target DNA or RNA to cause a loss of utility, and there is a sufficient degree of complementarity to avoid non-specific binding of the antisense compound to non-target sequences under conditions in which specific binding is desired, i.e., under physiological conditions in the case of in vivo assays or therapeutic treatment, and in the case of in vitro assays, under conditions in which the assays are performed.

[0027] Antisense compounds are commonly used as research reagents and diagnostics. For example, antisense oligonucleotides, which are able to inhibit gene expression with exquisite specificity, are often used by those of ordinary skill to elucidate the function of particular genes. Antisense compounds are also used, for example, to distinguish between functions of various members of a biological pathway. Antisense modulation has, therefore, been harnessed for research use.

[0028] The specificity and sensitivity of antisense is also harnessed by those of skill in the art for therapeutic uses. Antisense oligonucleotides have been employed as therapeutic moieties in the treatment of disease states in animals and man. Antisense oligonucleotides have been safely and effectively administered to humans and numerous clinical trials are presently underway. It is thus established that oligonucleotides can be useful therapeutic modalities that can be configured to be useful in treatment regimes for treatment of cells, tissues and animals, especially humans. In the context of this invention, the term “oligonucleotide” refers to an oligomer or polymer of ribonucleic acid (RNA) or deoxyribonucleic acid (DNA) or mimetics thereof. This term includes oligonucleotides composed of naturally occurring nucleobases, sugars and covalent internucleoside (backbone) linkages as well as oligonucleotides having non-naturally occurring portions which function similarly. Such modified or substituted oligonucleotides are often preferred over native forms because of desirable properties such as, for example, enhanced cellular uptake, enhanced affinity for nucleic acid target and increased stability in the presence of nucleases.

[0029] While antisense oligonucleotides are a preferred form of antisense compound, the present invention comprehends other oligomeric antisense compounds, including but not limited to oligonucleotide mimetics such as are described below. The antisense compounds in accordance with this invention preferably comprise from about 8 to about 30 nucleobases (i.e. from about 8 to about 30 linked nucleo sides). Particularly preferred antisense compounds are antisense oligonucleotides, even more preferably those comprising from about 12 to about 25 nucleobases. As is known in the art, a nucleoside is a base-sugar combination. The base portion of the nucleoside is normally a heterocyclic base. The two most common classes of such heterocyclic bases are the purines and the pyrimidines. Nucleotides are nucleosides that further include a phosphate group covalently linked to the sugar portion of the nucleoside. For those nucleosides that include a pentofuranosyl sugar, the phosphate group can be linked to either the 2′, 3′ or 5′ hydroxyl moiety of the sugar. In forming oligonucleotides, the phosphate groups covalently link adjacent nucleosides to one another to form a linear polymeric compound. In turn the respective ends of this linear polymeric structure can be further joined to form a circular structure, however, open linear structures are generally preferred. Within the oligonucleotide structure, the phosphate groups are commonly referred to as forming the internucleoside backbone of the oligonucleotide. The normal linkage or backbone of RNA and DNA is a 3′ to 5′ phosphodiester linkage.

[0030] Specific examples of preferred antisense compounds useful in this invention include oligonucleotides containing modified backbones or non-natural internucleoside linkages. As defined in this specification, oligonucleotides having modified backbones include those that retain a phosphorus atom in the backbone and those that do not have a phosphorus atom in the backbone. For the purposes of this specification, and as sometimes referenced in the art, modified oligonucleotides that do not have a phosphorus atom in their internucleoside backbone can also be considered to be oligonucleosides.

[0031] Preferred modified oligonucleotide backbones include, for example, phosphorothioates, chiral phosphorothioates, phosphorodithioates, phosphotriesters, aminoalkylphosphotriesters, methyl and other alkyl phosphonates including 3′alkylene phosphonates and chiral phosphonates, phosphinates, phosphoramidates including 3′-amino phosphoramidate and aminoalkylphosphoramidates, thionophosphoramidates, thionoalkylphosphonates, thionoalkylphosphotriesters, and boranophosphates having normal 3′-5′ linkages, 2′-5′ linked analogs of these, and those having inverted polarity wherein the adjacent pairs of nucleoside units are linked 3′-5′ to 5′-3′ or 2′-5′ to 5′-2′. Various salts, mixed salts and free acid forms are also included.

[0032] Representative United States patents that teach the preparation of the above phosphorus-containing linkages include, but are not limited to, U.S. Pat. Nos. 3,687,808; 4,469,863; 4,476,301; 5,023,243; 5,177,196; 5,188,897; 5,264,423; 5,276,019; 5,278,302; 5,286,717; 5,321,131; 5,399,676; 5,405,939; 5,453,496; 5,455,233; 5,466,677; 5,476,925; 5,519,126; 5,536,821; 5,541,306; 5,550,111; 5,563,253; 5,571,799; 5,587,361; and 5,625,050, each of which is herein incorporated by reference.

[0033] Preferred modified oligonucleotide backbones that do not include a phosphorus atom therein have backbones that are formed by short chain alkyl or cycloalkyl internucleoside linkages, mixed heteroatom and alkyl or cycloalkyl internucleoside linkages, or one or more short chain heteroatomic or heterocyclic internucleoside linkages. These include those having morpholino linkages (formed in part from the sugar portion of a nucleoside); siloxane backbones; sulfide, sufoxide and sulfone backbones; formacetyl and thioformacetyl backbones; methylene formacetyl and thioformacetyl backbones; alkene containing backbones; sulfamate backbones; methyleneimino and methylenehydrazino backbones; sulfonate and sulfonamide backbones; amide backbones; and others having mixed N, O, S and CH₂ component parts.

[0034] Representative United States patents that teach the preparation of the above oligonucleosides include, but are not limited to, U.S. Pat. Nos. 5,034,506; 5,166,315; 5,185,444; 5,214,134; 5,216,141; 5,235,033; 5,264,562; 5,264,564; 5,405,938; 5,434,257; 5,466,677; 5,470,967; 5,489,677; 5,541,307; 5,561,225; 5,596,086; 5,602,240; 5,610,289; 5,602,240; 5,608,046; 5,610,289; 5,618,704; 5,623,070; 5,663,312; 5,633,360; 5,677,437; and 5,677,439, ach of which is herein incorporated by reference.

[0035] In other preferred oligonucleotide mimetics, both the sugar and the internucleoside linkage, i.e., the backbone, of the nucleotide units are replaced with novel groups. The base units are maintained for hybridization with an appropriate nucleic acid target compound. One such oligomeric compound, an oligonucleotide mimetic that has been shown to have excellent hybridization properties, is referred to as a peptide nucleic acid (PNA). In PNA compounds, the sugar-backbone of an oligonucleotide is replaced with an amide containing backbone, in particular an aminoethylglycine backbone. The nucleobases are retained and are bound directly or indirectly to aza nitrogen atoms of the amide portion of the backbone. Representative United States patents that teach the preparation of PNA compounds include, but are not limited to, U.S. Pat. Nos. 5,539,082; 5,714,331; and 5,719,262, each of which is herein incorporated by reference. Further teaching of PNA compounds can be found in Nielsen et al., Science, 1991, 254, 1497-1500.

[0036] Most preferred embodiments of the invention are oligonucleotides with phosphorothioate backbones and oligonucleosides with heteroatom backbones, and in particular —CH₂—NH—O—CH₂—, —CH₂—N(CH₃)—O—CH₂— [known as a methylene (methylimino) or MMI backbone], —CH₂—O—N(CH₃)—CH₂—, —CH₂N(CH₃)—N(CH₃)—CH₂— and —O—N(CH₃)—CH₂—CH₂— [wherein the native phosphodiester backbone is represented as —O—P—O—CH₂—] of the above referenced U.S. Pat. No. 5,489,677, and the amide backbones of the above referenced U.S. Pat. No. 5,602,240. Also preferred are oligonucleotides having morpholino backbone structures of the above-referenced U.S. Pat. No. 5,034,506.

[0037] Modified oligonucleotides may also contain one or more substituted sugar moieties. Preferred oligonucleotides comprise one of the following at the 2′ position: OH; F; O—, S—, or N-alkyl; O—, S—, or N-alkenyl; O—, S— or N-alkynyl; or O-alkyl-O-alkyl, wherein the alkyl, alkenyl and alkynyl may be substituted or unsubstituted C₁ to C₁₀ alkyl or C₂ to C₁₀ alkenyl and alkynyl. Particularly preferred are O[(CH₂)ₙO]ₘCH₃, O(CH₂)ₙOCH₃, O(CH₂)ₙNH₂, O(CH₂)ₙCH₃, O(CH₂)ₙONH₂, and O(CH₂ₙON[(CH₂)ₙCH₃)]₂ where n and m are from 1 to about 10. Other preferred oligonucleotides comprise one of the following at the 2′ position: C₁ to C₁₀, (lower alkyl, substituted lower alkyl, alkaryl, aralkyl, O-alkaryl or O-aralkyl, SH, SCH₃, OCN, Cl, Br, CN, CF₃, OCF₃, SOCH₃, SO₂CH₃, ONO₂, NO₂, N₃, NH₂, heterocycloalkyl, heterocycloalkaryl, aminoalkylamino, polyalkylamino, substituted silyl, an RNA cleaving group, a reporter group, an intercalator, a group for improving the pharmacokinetic properties of an oligonucleotide, or a group for improving the pharmacodynamic properties of an oligonucleotide, and other substituents having similar properties. A preferred modification includes 2′ -methoxyethoxy (2′ -O—CH₂CH₂OCH₃, also known as 2′-O-(2-methoxyethyl) or 2′-MOE) (Martin et al., Helv. Chim. Acta, 1995, 78, 486-504) i.e., an alkoxyalkoxy group. A further preferred modification includes 2′-dimethylaminooxyethoxy, i.e., a O(CH₂)₂ON(CH₃)₂ group, also known as 2′-DMAOE, as described in examples herein below, and 2′-dimethylaminoethoxyethoxy (also known in the art as 2′-O-dimethylaminoethoxyethyl or 2′-DMAEOE), i.e., 2′-O—CH₂—O—CH₂—N (CH₂)₂, also described in examples herein below.

[0038] Other preferred modifications include 2′-methoxy (2′-O CH₃), 2′-aminopropoxy (2′-O CH₂ CH₂ CH₂NH₂) and 2′-fluoro (2′-F). Similar modifications may also be made at other positions on the oligonucleotide, particularly the 3′ position of the sugar on the 3′ terminal nucleotide or in 2′-5′ linked oligonucleotides and the 5′ position of 5′ terminal nucleotide. Oligonucleotides may also have sugar mimetics such as cyclobutyl moieties in place of the pentofuranosyl sugar. Representative United States patents that teach the preparation of such modified sugar structures include, but are not limited to, U.S. Pat. Nos. 4,981,957; 5,118,800; 5,319,080; 5,359,044; 5,393,878; 5,446,137; 5,466,786; 5,514,785; 5,519,134; 5,567,811; 5,576,427; 5,591,722; 5,597,909; 5,610,300; 5,627,053; 5,639,873; 5,646,265; 5,658,873; 5,670,633; and 5,700,920, each of which is herein incorporated by reference in its entirety.

[0039] Oligonucleotides may also include nucleobase (often referred to in the art simply as “base”) modifications or substitutions. As used herein, “unmodified” or “natural” nucleobases include the purine bases adenine (A) and guanine (G), and the pyrimidine bases thymine (T), cytosine (C) and uracil (U). Modified nucleobases include other synthetic and natural nucleobases such as 5-methylcytosine (5-me-C), 5-hydroxymethyl cytosine, xanthine, hypoxanthine, 2-aminoadenine, 6-methyl and other alkyl derivatives of adenine and guanine, 2-propyl and other alkyl derivatives of adenine and guanine, 2-thiouracil, 2-thiothymine and 2-thiocytosine, 5-halouracil and cytosine, 5-propynyl uracil and cytosine, 6-azo uracil, cytosine and thymine, 5-uracil (pseudouracil), 4-thiouracil, 8-halo, 8-amino, 8-thiol, 8-thioalkyl, 8-hydroxyl and other 8-substituted adenines and guanines, 5-halo particularly 5-bromo, 5-trifluoromethyl and other 5-substituted uracils and cytosines, 7-methylquanine and 7-methyladenine, 8-azaguanine and 8-azaadenine, 7-deazaguanine and 7-deazaadenine and 3-deazaguanine and 3-deazaadenine. Further nucleobases include those disclosed in U.S. Pat. No. 3,687,808, those disclosed in The Concise Encyclopedia Of Polymer Science And Engineering, pages 858-859, Kroschwitz, J. I., ed. John Wiley & Sons, 1990, those disclosed by Englisch et al., Angewandie Chemie, International Edition, 1991, 30, 613, and those disclosed by Sanghvi, Y. S., Chapter 15, Antisense Research and Applications, pages 289-302, Crooke, S. T. and Lebleu, B. ed., CRC Press, 1993. Certain of these nucleobases are particularly useful for increasing the binding affinity of the oligomeric compounds of the invention. These include 5-substituted pyrimidines, 6-azapyrimidines and N-2, N-6 and O-6 substituted purines, including 2-aminopropyladenine, 5-propynyluracil and 5-propynylcytosine. 5-methylcytosine substitutions have been shown to increase nucleic acid duplex stability by 0.6-1.2° C. (Sanghvi, Y. S., Crooke, S. T. and Lebleu, B., eds, Anlisense Research and Applications, CRC Press, Boca Raton, 1993, pp. 276-278) and are presently preferred base substitutions, even more particularly when combined with 2′-O-methoxyethyl sugar modifications.

[0040] Representative United States patents that teach the preparation of certain of the above noted modified nucleobases as well as other modified nucleobases include, but are not limited to, the above noted U.S. Pat. No. 3,687,808, as well as U.S. Pat. Nos. 4,845,205; 5,130,302; 5,134,066; 5,175,273; 5,367,066; 5,432,272; 5,457,187; 5,459,255; 5,484,908; 5,502,177; 5,525,711; 5,552,540; 5,587,469; 5,594,12', 5,596,091; 5,614,617; 5,750,692, and 5,681,941, each of which is herein incorporated by reference.

[0041] Another modification of the oligonucleotides of the invention involves chemically linking to the oligonucleotide one or more moieties or conjugates, which enhance the activity, cellular distribution, or cellular uptake of the oligonucleotide. Such moieties include but are not limited to lipid moieties such as a cholesterol moiety (Letsinger et al., Proc. Natl. Acad. Sci. USA, 1989, 86, 6553-6556), cholic acid (Manoharan et al., Bioorg. Med. Chem. Let., 1994, 4, 1053-1060), a thioether, e.g., hexyl-S-tritylthiol (Manoharan et al., Ann. N.Y. Acad. Sci., 1992, 660, 306-309; Manoharan et al., Bioorg. Med. Chem. Let., 1993, 3, 2765-2770), a thiocholesterol (Oberhauser et al., Nucl. Acids Res., 1992, 20, 533-538), an aliphatic chain, e.g., dodecandiol or undecyl residues (Saison-Behmoaras et al., EMBO J., 1991, 10, 1111-1118; Kabanov et al., FEBS Lett., 1990, 259, 327-330; Svinarchuk et al., Biochimie, 1993, 75, 49-54), a phospholipid, e.g., di-hexadecyl-rac-glycerol or triethylammonium 1,2-di-O-hexadecyl-rac-glycero-3-H-phosphonate (Manoharan et al., Tetrahedron Lett., 1995, 36, 3651-3654; Shea et al., Nucl. Acids Res., 1990, 18, 3777-3783), a polyamine or a polyethylene glycol chain (Mancharan et al., Nucleosides & Nucleotides, 1995, 14, 969-973), or adamantane acetic acid (Manoharan et al., Tetrahedron Lett., 1995, 36, 3651-3654), a palmityl moiety (Mishra et al., Biochim. Biophys. Acta, 1995, 1264, 229-237), or an octadecylamine or hexylamino-carbonyl-oxycholesterol moiety (Crooke et al., J. Pharmacol. Exp. Ther., 1996, 277, 923-937).

[0042] Representative United States patents that teach the preparation of such oligonucleotide conjugates include, but are not limited to, U.S. Pat. Nos. 4,828,979; 4,948,882; 5,218,105; 5,525,465; 5,541,313; 5,545,730; 5,552,538; 5,578,717, 5,580,731; 5,580,731; 5,591,584; 5,109,124; 5,118,802; 5,138,045; 5,414,077; 5,486,603; 5,512,439; 5,578,718; 5,608,046; 4,587,044; 4,605,735; 4,667,025; 4,762,779; 4,789,737; 4,824,941; 4,835,263; 4,876,335; 4,904,582; 4,958,013; 5,082,830; 5,112,963; 5,214,136; 5,082,830; 5,112,963; 5,214,136; 5,245,022; 5,254,469; 5,258,506; 5,262,536; 5,272,250; 5,292,873; 5,317,098; 5,371,241, 5,391,723; 5,416,203, 5,451,463; 5,510,475; 5,512,667; 5,514,785; 5,565,552; 5,567,810; 5,574,142; 5,585,481; 5,587,371; 5,595,726; 5,597,696; 5,599,923; 5,599,928 and 5,688,941, each of which is herein incorporated by reference.

[0043] It is not necessary for all positions in a given compound to be uniformly modified, and in fact more than one of the aforementioned modifications may be incorporated in a single compound or even at a single nucleoside within an oligonucleotide. The present invention also includes antisense compounds, which are chimeric compounds. “Chimeric” antisense compounds or “chimeras,” in the context of this invention, are antisense compounds, particularly oligonucleotides, which contain two or more chemically distinct regions, each made up of at least one monomer unit, i.e., a nucleotide in the case of an oligonucleotide compound. These oligonucleotides typically contain at least one region wherein the oligonucleotide is modified so as to confer upon the oligonucleotide increased resistance to nuclease degradation, increased cellular uptake, and/or increased binding affinity for the target nucleic acid. An additional region of the oligonucleotide may serve as a substrate for enzymes capable of cleaving RNA:DNA or RNA:RNA hybrids. By way of example, RNase H is a cellular endonuclease, which cleaves the RNA strand of RNA:DNA duplex. Activation of RNase H, therefore, results in cleavage of the RNA target, thereby greatly enhancing the efficiency of oligonucleotide inhibition of gene expression. Consequently, comparable results can often be obtained with shorter oligonucleotides when chimeric oligonucleotides are used, compared to phosphorothioate deoxyoligonucleotides hybridizing to the same target region. Cleavage of the RNA target can be routinely detected by gel electrophoresis and, if necessary, associated nucleic acid hybridization techniques known in the art.

[0044] Chimeric antisense compounds of the invention may be formed as composite structures of two or more oligonucleotides, modified oligonucleotides, oligonucleosides and/or oligonucleotide mimetics as described above. Such compounds have also been referred to in the art as hybrids or gapmers. Representative United States patents that teach the preparation of such hybrid structures include, but are not limited to, U.S. Pat. Nos. 5,013,830; 5,149,797; 5,220,007; 5,256,775; 5,366,878; 5,403,711; 5,491,133; 5,565,350; 5,623,065; 5,652,355; 5,652,356; and 5,700,922, each of which is herein incorporated by reference in its entirety.

[0045] The antisense compounds used in accordance with this invention may be conveniently, and routinely made through the well-known technique of solid phase synthesis. Equipment for such synthesis is sold by several vendors including, for example, Applied Biosystems (Foster City, Calif.). Any other means for such synthesis known in the art may additionally or alternatively be employed. It is well known to use similar techniques to prepare oligonucleotides such as the phosphorothioates and alkylated derivatives.

[0046] The antisense compounds of the invention are synthesized in vitro and do not include antisense compositions of biological origin, or genetic vector constructs designed to direct the in vivo synthesis of antisense molecules. The compounds of the invention may also be admixed, encapsulated, conjugated or otherwise associated with other molecules, molecule structures or mixtures of compounds, as for example, liposomes, receptor targeted molecules, oral, rectal, topical or other formulations, for assisting in uptake, distribution and/or absorption. Representative United States patents that teach the preparation of such uptake, distribution and/or absorption assisting formulations include, but are not limited to, U.S. Pat. Nos. 5,108,921; 5,354,844; 5,416,016; 5,459,127; 5,521,291; 5,543,158; 5,547,932; 5,583,020; 5,591,721; 4,426,330; 4,534,899; 5,013,556; 5,108,921; 5,213,804; 5,227,170; 5,264,221; 5,356,633; 5,395,619; 5,416,016; 5,417,978; 5,462,854; 5,469,854; 5,512,295; 5,527,528; 5,534,259; 5,543,152; 5,556,948; 5,580,575; and 5,595,756, each of which is herein incorporated by reference.

[0047] The antisense compounds of the invention encompass any pharmaceutically acceptable salts, esters, or salts of such esters, or any other compound which, upon administration to an animal including a human, is capable of providing (directly or indirectly) the biologically active metabolite or residue thereof. Accordingly, for example, the disclosure is also drawn to prodrugs and pharmaceutically acceptable salts of the compounds of the invention, pharmaceutically acceptable salts of such prodrugs, and other bioequivalents.

[0048] The term “prodrug” indicates a therapeutic agent that is prepared in an inactive form that is converted to an active form (i.e., drug) within the body or cells thereof by the action of endogenous enzymes or other chemicals and/or conditions. In particular, prodrug versions of the oligonuclectides of the invention are prepared as SATE [(S-acetyl-2-thioethyl) phosphate] derivatives according to the methods disclosed in WO 93/24510 to Gosselin et al., published Dec. 9, 1993 or in WO 94/26764 to Imbach et al.

[0049] The term “pharmaceutically acceptable salts” refers to physiologically and pharmaceutically acceptable salts of the compounds of the invention: i.e., salts that retain the desired biological activity of the parent compound and do not impart undesired toxicological effects thereto.

[0050] Pharmaceutically acceptable base addition salts are formed with metals or amines, such as alkali and alkaline earth metals or organic amines. Examples of metals used as cations are sodium, potassium, magnesium, calcium, and the like. Examples of suitable amines are N,N′-dibenzylethylenediamine, chloroprocaine, choline, diethanolamine, dicyclohexylamine, ethylenediamine, N-methylglucamine, and procaine (see, for example, Berge et al., “Pharmaceutical Salts,” J. of Pharma Sci., 1977, 66, 119). The base addition salts of said acidic compounds are prepared by contacting the free acid form with a sufficient amount of the desired base to produce the salt in the conventional manner. The free acid form may be regenerated by contacting the salt form with an acid and isolating the free acid in the conventional manner. The free acid forms differ from their respective salt forms somewhat in certain physical properties such as solubility in polar solvents, but otherwise the salts are equivalent to their respective free acid for purposes of the present invention. As used herein, a “pharmaceutical addition salt” includes a pharmaceutically acceptable salt of an acid form of one of the components of the compositions of the invention. These include organic or inorganic acid salts of the amines. Preferred acid salts are the hydrochlorides, acetates, salicylates, nitrates and phosphates. Other suitable pharmaceutically acceptable salts are well known to those skilled in the art and include basic salts of a variety of inorganic and organic acids, such as, for example, with inorganic acids, such as for example hydrochloric acid, hydrobromic acid, sulfuric acid or phosphoric acid; with organic carboxylic, sulfonic, sulfo or phospho acids or N-substituted sulfamic acids, for example acetic acid, propionic acid, glycolic acid, succinic acid, maleic acid, hydroxymaleic acid, methylmaleic acid, fumaric acid, malic acid, tartaric acid, lactic acid, oxalic acid, gluconic acid, glucaric acid, glucuronic acid, citric acid, benzoic acid, cinnamic acid, mandelic acid, salicylic acid, 4-aminosalicylic acid, 2-phenoxybenzoic acid, 2-acetoxybenzoic acid, embonic acid, nicotinic acid or isonicotinic acid; and with amino acids, such as the 20 alpha-amino acids involved in the synthesis of proteins in nature, for example glutamic acid or aspartic acid, and also with phenylacetic acid, methanesulfonic acid, ethanesulfonic acid, 2-hydroxyethanesulfonic acid, ethane-1,2-disulfonic acid, benzenesulfonic acid, 4-methylbenzenesulfoic acid, naphthalene-2-sulfonic acid, naphthalene-1,5-disulfonic acid, 2- or 3-phosphoglycerate, glucose-6-phosphate, N-cyclohexylsulfamic acid (with the formation of cyclamates), or with other acid organic compounds, such as ascorbic acid. Pharmaceutically acceptable salts of compounds may also be prepared with a pharmaceutically acceptable cation. Suitable pharmaceutically acceptable cations are well known to those skilled in the art and include alkaline, alkaline earth, ammonium and quaternary ammonium cations. Carbonates or hydrogen carbonates are also possible.

[0051] For oligonucleotides, preferred examples of pharmaceutically acceptable salts include but are not limited to (a) salts formed with cations such as sodium, potassium, ammonium, magnesium, calcium, polyamines such as spermine and spermidine, etc.; (b) acid addition salts formed with inorganic acids, for example hydrochloric acid, hydrobromic acid, sulfuric acid, phosphoric acid, nitric acid and the like; (c) salts formed with organic acids such as, for example, acetic acid, oxalic acid, tartaric acid, succinic acid, maleic acid, fumaric acid, gluconic acid, citric acid, malic acid, ascorbic acid, benzoic acid, tannic acid, palmitic acid, alginic acid, polyglutamic acid, naphthalenesulfonic acid, methanesulfonic acid, p-toluenesulfonic acid, naphthalenedisulfonic acid, polygalacturonic acid, and the like; and (d) salts formed from elemental anions such as chlorine, bromine, and iodine.

[0052] The antisense compounds of the present invention can be utilized for diagnostics, therapeutics, prophylaxis and as research reagents and kits. For therapeutics, an animal, preferably a human, suspected of having a disease or disorder, which can be treated by modulating the expression of GFAT, is treated by administering antisense compounds in accordance with this invention. The compounds of the invention can be utilized in pharmaceutical compositions by adding an effective amount of an antisense compound to a suitable pharmaceutically acceptable diluent or carrier. Use of the antisense compounds and methods of the invention may also be useful prophylactically, e.g., to prevent or delay infection, inflammation or tumor formation, for example.

[0053] The antisense compounds of the invention are useful for research and diagnostics, because these compounds hybridize to nucleic acids encoding GFAT, enabling sandwich and other assays to easily be constructed to exploit this fact. Hybridization of the antisense oligonucleotides of the invention with a nucleic acid encoding GFAT can be detected by means known in the art. Such means may include conjugation of an enzyme to the oligonucleotide, radiolabelling of the oligonucleotide or any other suitable detection means. Kits using such detection means for detecting the level of GFAT in a sample may also be prepared.

[0054] The present invention also includes pharmaceutical compositions and formulations, which include the antisense compounds of the invention. The pharmaceutical compositions of the present invention may be administered in a number of ways depending upon whether local or systemic treatment is desired and upon the area to be treated. Administration may be topical (including ophthalmic and to mucous membranes including vaginal and rectal delivery), pulmonary, e.g., by inhalation or insufflation of powders or aerosols, including by nebulizer, intratracheal, intranasal, epidermal and transdermal), oral or parenteral. Parenteral administration includes intravenous, intraarterial, subcutaneous, intraperitoneal or intramuscular injection or infusion; or intracranial, e.g., intrathecal or intraventricular, administration. Oligonucleotides with at least one 2′-O-methoxyethyl modification are believed to be particularly useful for oral administration.

[0055] Pharmaceutical compositions and formulations for topical administration may include transdermal patches, ointments, lotions, creams, gels, drops, suppositories, sprays, liquids, and powders. Conventional pharmaceutical carriers, aqueous, powder or oily bases, thickeners and the like may be necessary or desirable. Coated condoms, gloves, and the like may also be useful.

[0056] Compositions and formulations for oral administration include powders or granules, suspensions, or solutions in water or non-aqueous media, capsules, sachets, or tablets. Thickeners, flavoring agents, diluents, emulsifiers, dispersing aids, or binders may be desirable.

[0057] Compositions and formulations for parenteral, intrathecal or intraventricular administration may include sterile aqueous solutions, which may also contain buffers, diluents and other suitable additives such as, but not limited to, penetration enhancers, carrier compounds and other pharmaceutically acceptable carriers or excipients.

[0058] Pharmaceutical compositions of the present invention include, but are not limited to, solutions, emulsions, and liposome-containing formulations. These compositions may be generated from a variety of components that include, but are not limited to, preformed liquids, self-emulsifying solids and self-emulsifying semisolids.

[0059] The pharmaceutical formulations of the present invention, which may conveniently be presented in unit dosage form, may be prepared according to conventional techniques well known in the pharmaceutical industry. Such techniques include the step of bringing into association the active ingredients with the pharmaceutical carrier(s) or excipient(s). In general the formulations are prepared by uniformly and intimately bringing into association the active ingredients with liquid carriers or finely divided solid carriers or both, and then, if necessary, shaping the product.

[0060] The compositions of the present invention may be formulated into any of many possible dosage forms such as, but not limited to, tablets, capsules, liquid syrups, soft gels, suppositories, and enemas. The compositions of the present invention may also be formulated as suspensions in aqueous, non-aqueous or mixed media. Aqueous suspensions may further contain substances, which increase the viscosity of the suspension including, for example, sodium carboxymethylcellulose, sorbitol, and/or dextran. The suspension may also contain stabilizers.

[0061] In one embodiment of the present invention the pharmaceutical compositions may be formulated and used as foams. Pharmaceutical foams include formulations such as, but not limited to, emulsions, microemulsions, creams, jellies, and liposomes. While basically similar in nature these formulations vary in the components and the consistency of the final product. The preparation of such compositions and formulations is generally known to those skilled in the pharmaceutical and formulation arts and may be applied to the formulation of the compositions of the present invention.

[0062] Emulsions

[0063] The compositions of the present invention may be prepared and formulated as emulsions. Emulsions are typically heterogenous systems of one liquid dispersed in another in the form of droplets usually exceeding 0.1 μm in diameter. (Idson, in Pharmaceutical Dosage Forms, Lieberman, Rieger and Banker (Eds.), 1988, Marcel Dekker, Inc., New York, N.Y., volume 1, p. 199; Rosoff, in Pharmaceutical Dosage Forms, Lieberman, Rieger and Banker (Eds.), 1988, Marcel Dekker, Inc., New York, N.Y., Volume 1, p. 245; Block in Pharmaceutical Dosage Forms, Lieberman, Rieger and Banker (Eds.), 1988, Marcel Dekker, Inc., New York, N.Y., volume 2, p. 335; Higuchi et al., in Remington's Pharmaceutical Sciences, Mack Publishing Co., Easton, Pa., 1985, p. 301). Emulsions are often biphasic systems comprising of two immiscible liquid phases intimately mixed and dispersed with each other. In general, emulsions may be either water-in-oil (w/o) or of the oil-in-water (o/w) variety. When an aqueous phase is finely divided into and dispersed as minute droplets into a bulk oily phase the resulting composition is called a water-in-oil (w/o) emulsion. Alternatively, when an oily phase is finely divided into and dispersed as minute droplets into a bulk aqueous phase the resulting composition is called an oil-in-water (o/w) emulsion. Emulsions may contain additional components in addition to the dispersed phases and the active drug, which may be present as a solution in either the aqueous phase, oily phase or itself as a separate phase. Pharmaceutical excipients such as emulsifiers, stabilizers, dyes, and anti-oxidants may also be present in emulsions as needed. Pharmaceutical emulsions may also be multiple emulsions that are comprised of more than two phases such as, for example, in the case of oil-in-water-in-oil (o/w/o) and water-in-oil-in-water (w/o/w) emulsions. Such complex formulations often provide certain advantages that simple binary emulsions do not. Multiple emulsions in which individual oil droplets of an o/w emulsion enclose small water droplets constitute a w/o/w emulsion. Likewise a system of oil droplets enclosed in globules of water stabilized in an oily continuous provides an o/w/o emulsion.

[0064] Emulsions are characterized by little or no thermodynamic stability. Often, the dispersed or discontinuous phase of the emulsion is well dispersed into the external or continuous phase and maintained in this form through the means of emulsifiers or the viscosity of the formulation. Either of the phases of the emulsion may be a semisolid or a solid, as is the case of emulsion-style ointment bases and creams. Other means of stabilizing emulsions entail the use of emulsifiers that may be incorporated into either phase of the emulsion. Emulsifiers may broadly be classified into four categories: synthetic surfactants, naturally occurring emulsifiers, absorption bases, and finely dispersed solids (Idson, in Pharmaceutical Dosaqe Forms, Lieberman, Rieger and Banker (Eds.), 1988, Marcel Dekker, Inc., New York, N.Y., volume 1, p. 199).

[0065] Synthetic surfactants, also known as surface active agents, have found wide applicability in the formulation of emulsions and have been reviewed in the literature (Rieger, in Pharmaceutical Dosage Forms, Lieberman, Rieger and Banker (Eds.), 1988, Marcel Dekker, Inc., New York, N.Y., volume 1, p. 285; Idson, in Pharmaceutical Dosage Forms, Lieberman, Rieger and Banker (Eds.), Marcel Dekker, Inc., New York, N.Y., 1988, volume 1, p. 199). Surfactants are typically amphiphilic and comprise a hydrophilic and a hydrophobic portion. The ratio of the hydrophilic to the hydrophobic nature of the surfactant has been termed the hydrophile/lipophile balance (HLB) and is a valuable tool in categorizing and selecting surfactants in the preparation of formulations. Surfactants may be classified into different classes based on the nature of the hydrophilic group: nonionic, anionic, cationic, and amphoteric (Rieger, in Pharmaceutical Dosage Forms, Lieberman, Rieger and Banker (Eds.), 1988, Marcel Dekker, Inc., New York, N.Y., volume 1, p. 285).

[0066] Naturally occurring emulsifiers used in emulsion formulations include lanolin, beeswax, phosphatides, lecithin and acacia. Absorption bases possess hydrophilic properties such that they can soak up water to form w/o emulsions yet retain their semisolid consistencies, such as anhydrous lanolin and hydrophilic petrolatum. Finely divided solids have also been used as good emulsifiers especially in combination with surfactants and in viscous preparations. These include polar inorganic solids, such as heavy metal hydroxides, nonswelling clays such as bentonite, attapulgite, hectorite, kaolin, montmorillonite, colloidal aluminum silicate and colloidal magnesium aluminum silicate, pigments and nonpolar solids such as carbon or glyceryl tristearate.

[0067] A large variety of non-emulsifying materials are also included in emulsion formulations and contribute to the properties of emulsions. These include fats, oils, waxes, fatty acids, fatty alcohols, fatty esters, humectants, hydrophilic colloids, preservatives, and antioxidants (Block, in Pharmaceutical Dosage Forms, Lieberman, Rieger and Banker (Eds.), 1988, Marcel Dekker, Inc., New York, N.Y., volume 1, p. 335; Idson, in Pharmaceutical Dosage Forms, Lieberman, Rieger and Banker (Eds.), 1988, Marcel Dekker, Inc., New York, N.Y., volume 1, p. 199).

[0068] Hydrophilic colloids or hydrocolloids include naturally occurring gums and synthetic polymers such as polysaccharides (for example, acacia, agar, alginic acid, carrageenan, guar gum, karaya gum, and tragacanth), cellulose derivatives (for example, carboxymethyl cellulose and carboxypropylcellulose), and synthetic polymers (for example, carbomers, cellulose ethers, and carboxyvinyl polymers). These disperse or swell in water to form colloidal solutions that stabilize emulsions by forming strong interfacial films around the dispersed phase droplets and by increasing the viscosity of the external phase.

[0069] Since emulsions often contain a number of ingredients such as carbohydrates, proteins, sterols, and phosphatides that may readily support the growth of microbes, these formulations often incorporate preservatives. Commonly used preservatives included in emulsion formulations include methyl paraben, propyl paraben, quaternary ammonium salts, benzalkonium chloride, esters of p-hydroxybenzoic acid, and boric acid. Antioxidants are also commonly added to emulsion formulations to prevent deterioration of the formulation. Antioxidants used may be free radical scavengers such as tocopherols, alkyl gallate, butylated hydroxyanisole, butylated hydroxytoluene, or reducing agents such as ascorbic acid and sodium metabisulfite, and antioxidant synergists such as citric acid, tartaric acid, and lecithin.

[0070] The application of emulsion formulations via dermatological, oral, and parenteral routes and methods for their manufacture have been reviewed in the literature (Idson, in Pharmaceutical Dosage Forms, Lieberman, Rieger and Banker (Eds.), 1988, Marcel Dekker, Inc., New York, N.Y., volume 1, p. 199). Emulsion fonmulations for oral delivery have been very widely used because of reasons of ease of formulation, efficacy from an absorption and bioavailability standpoint. (Rosoff, in Pharmaceutical Dosage Forms, Lieberman, Rieger and Banker (Eds.), 1988, Marcel Dekker, Inc., New York, N.Y., volume 1, p. 245; Idson, in Pharmaceutical Dosage Forms, Lieberman, Rieger and Banker (Eds.), 1988, Marcel Dekker, Inc., New York, N.Y., volume 1, p. 199). Mineral-oil base laxatives, oil-soluble vitamins, and high fat nutritive preparations are among the materials that have commonly been administered orally as o/w emulsions.

[0071] In one embodiment of the present invention, the compositions of oligonucleotides and nucleic acids are formulated as microemulsions. A microemulsion may be defined as a system of water, oil, and amphiphile, which is a single optically isotropic, and thermodynamically stable liquid solution (Rosoff, in Pharmaceutical Dosage Forms, Lieberman, Rieger and Banker (Eds.), 1988, Marcel Dekker, Inc., New York, N.Y., volume 1, p. 245). Typically microemulsions are systems that are prepared by first dispersing an oil in an aqueous surfactant solution and then adding a sufficient amount of a fourth component, generally an internediate chain-length alcohol to form a transparent system. Therefore, microemulsions have also been described as thermodynamically stable, isotropically clear dispersions of two immiscible liquids that are stabilized by interfacial films of surface-active molecules (Leung and Shah, in: Controlled Release of Drugs: Polymers and Aggregate Systems, Rosoff, M., Ed., 1989, VCH Publishers, New York, pages 1852'5). Microemulsions commonly are prepared via a combination of three to five components that include oil, water, surfactant, cosurfactant, and electrolyte. Whether the microemulsion is of the water-in-oil (w/o) or an oil-in-water (o/w) type is dependent on the properties of the oil and surfactant used and on the structure and geometric packing of the polar heads and hydrocarbon tails of the surfactant molecules (Schott, in Remington's Pharmaceutical Sciences, Mack Publishing Co., Easton, Pa., 1985, p. 271).

[0072] The phenomenological approach utilizing phase diagrams has been extensively studied and has yielded a comprehensive knowledge, to one skilled in the art, of how to formulate microemulsions (Rosoff, in Pharmaceutical Dosage Forms, Lieberman, Rieger and Banker (Eds.), 1988, Marcel Dekker, Inc., New York, N.Y., volume 1, p. 245; Block, in Pharmaceutical Dosage Forms, Lieberman, Rieger and Banker (Eds.), 1988, Marcel Dekker, Inc., New York, N.Y., volume 1, p. 335). Compared to conventional emulsions, microemulsions offer the advantage of solubilizing water-insoluble drugs in a formulation of thermodynamically stable droplets that are formed spontaneously.

[0073] Surfactants used in the preparation of microemulsions include, but are not limited to, ionic surfactants, non-ionic surfactants, Brij 96, polyoxyethylene oleyl ethers, polyglycerol fatty acid esters, tetraglycerol monolaurate (ML310), tetraglycerol monooleate (MO310), hexaglycerol monooleate (PO310), hexaglycerol pentaoleate (PO500), decaglycerol monocaprate (MCA750), decaglycerol monooleate (MO750), decaglycerol sequioleate (S0750), decaglycerol decaoleate (DAO750), alone or in combination with cosurfactants. The cosurfactant, usually a short-chain alcohol such as ethanol, 1-propanol, and 1-butanol, serves to increase the interfacial fluidity by penetrating into the surfactant film and consequently creating a disordered film because of the void space generated among surfactant molecules. Microemulsions may, however, be prepared without the use of cosurfactants and alcohol-free self-emulsifying microemulsion systems are known in the art. The aqueous phase may typically be, but is not limited to, water, an aqueous solution of the drug, glycerol, PEG300, PEG400, polyglycerols, propylene glycols, and derivatives of ethylene glycol. The oil phase may include, but is not limited to, materials such as Captex 300, Captex 355, Capmul MCM, fatty acid esters, medium chain (C8-C12) mono, di, and triglycerides, polyoxyethylated glyceryl fatty acid esters, fatty alcohols, polyglycolized glycerides, saturated polyglycolized C8-C10 glycerides, vegetable oils and silicone oil.

[0074] Microemulsions are particularly of interest from the standpoint of drug solubilization and the enhanced absorption of drugs. Lipid based microemulsions (both o/w and w/o) have been proposed to enhance the oral bioavailability of drugs, including peptides (Constantinides et al., Pharmaceutical Research, 1994, 11, 1385-1390; Ritschel, Meth. Find. Exp. Clin. Pharmacol., 1993, 13, 205). Microemulsions afford advantages of improved drug solubilization, protection of drug from enzymatic hydrolysis, possible enhancement of drug absorption due to surfactant-induced alterations in membrane fluidity and permeability, ease of preparation, ease of oral administration over solid dosage forms, improved clinical potency, and decreased toxicity (Constantinides et al., Pharmaceutical Research, 1994, 11, 1385; Ho et al., J. Pharm. Sci., 1996, 85, 138-143). Often microemulsions may form spontaneously when their components are brought together at ambient temperature. This may be particularly advantageous when formulating thermolabile drugs, peptides, or oligonucleotides. Microemulsions have also been effective in the transdermal delivery of active components in both cosmetic and pharmaceutical applications. It is expected that the microemulsion compositions and formulations of the present invention will facilitate the increased systemic absorption of oligonucleotides and nucleic acids from the gastrointestinal tract, as well as improve the local cellular uptake of oligonucleotides and nucleic acids within the gastrointestinal tract, vagina, buccal cavity and other areas of administration.

[0075] Microemulsions of the present invention may also contain additional components and additives such as sorbitan monostearate (Grill 3), Labrasol, and penetration enhancers to improve the properties of the formulation and to enhance the absorption of the oligonucleotides and nucleic acids of the present invention. Penetration enhancers used in the microemulsions of the present invention may be classified as belonging to one of five broad categories—surfactants, fatty acids, bile salts, chelating agents, and non-chelating non-surfactants (Lee et al., Critical Reviews in Therapeutic Drug Carrier Systems, 1991, p. 92). Each of these classes has been discussed above.

[0076] Liposomes

[0077] There are many organized surfactant structures besides microemulsions that have been studied and used for the formulation of drugs. These include monolayers, micelles, bilayers, and vesicles. Vesicles, such as liposomes, have attracted great interest because of their specificity and the duration of action they offer from the standpoint of drug delivery. As used in the present invention, the term “liposome” means a vesicle composed of amphiphilic lipids arranged in a spherical bilayer or bilayers.

[0078] Liposomes are unilamellar or multilamellar vesicles which have a membrane formed from a lipophilic material and an aqueous interior. The aqueous portion contains the composition to be delivered. Cationic liposomes possess the advantage of being able to fuse to the cell wall. Noncationic liposomes, although not able to fuse as efficiently with the cell wall, are taken up by macrophages in vivo.

[0079] In order to cross intact mammalian skin, lipid vesicles must pass through a series of fine pores, each with a diameter less than 50 nm, under the influence of a suitable transdermal gradient. Therefore, it is desirable to use a liposome, which is highly deformable and able to pass through such fine pores.

[0080] Further advantages of liposomes include; liposomes obtained from natural phospholipids are biocompatible and biodegradable; liposomes can incorporate a wide range of water and lipid soluble drugs; liposomes can protect encapsulated drugs in their internal compartments from metabolism and degradation (Rosoff, in Pharmaceutical Dosage Forms, Lieberman, Rieger and Banker (Eds.), 1988, Marcel Dekker, Inc., New York, N.Y., volume 1, P. 245). Important considerations in the preparation of liposome formulations are the lipid surface charge, vesicle size, and the aqueous volume of the liposomes.

[0081] Liposomes are useful for the transfer and delivery of active ingredients to the site of action. Because the liposomal membrane is structurally similar to biological membranes, when liposomes are applied to a tissue, the liposomes start to merge with the cellular membranes. As the merging of the liposome and cell progresses, the liposomal contents are emptied into the cell where the active agent may act.

[0082] Liposomal formulations have been the focus of extensive investigation as the mode of delivery for many drugs. There is growing evidence that for topical administration, liposomes present several advantages over other formulations. Such advantages include reduced side-effects related to high systemic absorption of the administered drug, increased accumulation of the administered drug at the desired target, and the ability to administer a wide variety of drugs, both hydrophilic and hydrophobic, into the skin.

[0083] Several reports have detailed the ability of liposomes to deliver agents including high-molecular weight DNA into the skin. Compounds including analgesics, antibodies, hormones, and high-molecular weight DNAs have been administered to the skin. The majority of applications resulted in the targeting of the upper epidermis.

[0084] Liposomes fall into two broad classes. Cationic liposomes are positively charged liposomes, which interact with the negatively charged DNA molecules to form a stable complex. The positively charged DNA/liposome complex binds to the negatively charged cell surface and is internalized in an endosome. Due to the acidic pH within the endosome, the liposomes are ruptured, releasing their contents into the cell cytoplasm (Wang et al., Biochem. Biophys. Res. Commun., 1987, 147, 980-985).

[0085] Liposomes, which are pH-sensitive or negatively charged, entrap DNA rather than complex with it. Since both the DNA and the lipid are similarly charged, repulsion rather than complex formation occurs. Nevertheless, some DNA is entrapped within the aqueous interior of these liposomes. pH-sensitive liposomes have been used to deliver DNA encoding the thymidine kinase gene to cell monolayers in culture. Expression of the exogenous gene was detected in the target cells (Zhou et al., Journal of Controlled Release, 1992, 19, 269-274).

[0086] One major type of liposomal composition includes phospholipids other than naturally derived phosphatidyl choline. Neutral liposome compositions, for example, can be formed from dimyristoyl phosphatidyl choline (DMPC) or dipalmitoyl phosphatidyl choline (DPPC). Anionic liposome compositions generally are formed from dimyristoyl phosphatidylglycerol, while anionic fusogenic liposomes are formed primarily from dioleoyl phosphatidylethanolamine (DOPE). Another type of liposomal composition is formed from phosphatidylcholine (PC) such as, for example, soybean PC, and egg PC. Another type is formed from mixtures of phospholipid and/or phosphatidylcholine and/or cholesterol.

[0087] Several studies have assessed the topical delivery of liposomal drug formulations to the skin. Application of liposomes containing interferon to guinea pig skin resulted in a reduction of skin herpes sores while delivery of interferon via other means (e.g. as a solution or as an emulsion) were ineffective (Weiner et al., Journal of Drug Targeting, 1992, 2, 405-410). Further, an additional study tested the efficacy of interferon administered as part of a liposomal formulation to the administration of interferon using an aqueous system, and concluded that the liposomal formulation was superior to aqueous administration (du Plessis et al., Antiviral Research, 1992, 18, 259-265).

[0088] Non-ionic liposomal systems have also been examined to determine their utility in the delivery of drugs to the skin, in particular systems comprising non-ionic surfactant and cholesterol. Non-ionic liposomal formulations comprising Novasome™ I (glyceryl dilaurate/cholesterol/polyoxyethylene-10-stearyl ether) and Novasome™ II (glyceryl distearate/cholesterol/polyoxyethylene-10-stearyl ether) were used to deliver cyclosporin-A into the dermis of mouse skin. Results indicated that such non-ionic liposomal systems were effective in facilitating the deposition of cyclosporin-A into different layers of the skin (Hu et al. S.T.P.Pharma. Sci., 1994, 4, 6, 466).

[0089] Liposomes also include “sterically stabilized” liposomes, a term which, as used herein, refers to liposomes comprising one or more specialized lipids that, when incorporated into liposomes, result.in enhanced circulation lifetimes relative to liposomes lacking such specialized lipids. Examples of sterically stabilized liposomes are those in which part of the vesicle-forming lipid portion of the liposome (A) comprises one or more glycolipids, such as monosialoganglioside GM1, or (B) is derivatized with one or more hydrophilic polymers, such as a polyethylene glycol (PEG) moiety. While not wishing to be bound by any particular theory, it is thought in the art that, at least for sterically stabilized liposomes containing gangliosides, sphingomyelin, or PEG-derivatized lipids, the enhanced circulation half-life of these sterically stabilized liposomes derives from a reduced uptake into cells of the reticuloendothelial system (RES) (Allen et al., FEBS Letters, 1987, 223, 42; Wu et al., Cancer Research, 1993, 53, 3765).

[0090] Various liposomes comprising one or more glycolipids are known in the art. Papabadjopoulos et al. (Ann. N.Y Acad. Sci., 1987, 507, 64) reported the ability of monosialoganglioside GM1, galactocerebroside sulfate, and phosphatidylinositol to improve blood half-lives of liposomes. These findings were expounded upon by Gabizon et al. (Proc. Natl. Acad. Sci. U.S.A., 1988, 85, 6949), U.S. Pat. No. 4,837,028 and WO 88/04924, both to Allen et al., disclose liposomes comprising (1) sphingomyelin and (2) the ganglioside Gjor a galactocerebroside sulfate ester. U.S. Pat. No. 5,543,152 (Webb et al.) discloses liposomes comprising sphingomyelin. Liposomes comprising 1,2-sn-dimyristoylphosphatidylcholine are disclosed in WO 97/13499 (Lim et al.).

[0091] Many liposomes comprising lipids derivatized with one or more hydrophilic polymers, and methods of preparation thereof, are known in the art. Sunamoto et al. (Bull. Chem. Soc. Jpn., 1980, 53, 2778) described liposomes comprising a nonionic detergent, 2C1215G, which contains a PEG moiety. Illum et al. (FEBS Lett., 1984, 167, 79) noted that hydrophilic coating of polystyrene particles with polymeric glycols results in significantly enhanced blood half-lives. Synthetic phospholipids modified by the attachment of carboxylic groups of polyalkylene glycols (e.g., PEG) are described by Sears (U.S. Pat. Nos. 4,426,330 and 4,534,899). Klibanov et al. (FEBS Lett., 1990, 268, 235) described experiments demonstrating that liposomes comprising phosphatidylethanolamine (PE) derivatized with PEG or PEG stearate have significant increases in blood circulation half-lives. Blume et al. (Biochimica et Biophysica Acta, 1990, 1029, 91) extended such observations to other PEG derivatized phospholipids, e.g., DSPE-PEG, formed from the combination of distearoylphosphatidylethanolamine (DSPE) and PEG. Liposomes having covalently bound PEG moieties on their external surface are described in European Patent No. EP 0 445 131 B1 and WO 90/04384 to Fisher. Liposome compositions containing 1-20 mole percent of PE derivatized with PEG, and methods of use thereof, are described by Woodle et al. (U.S. Pat. Nos. 5,013,556 and 5,356,633) and Martin et al. (U.S. Pat. No. 5,213,804 and European Patent No. EP 0 496 813 B1). Liposomes comprising a number of other lipid-polymer conjugates are disclosed in WO 91/05545 and U.S. Pat. No. 5,225,212 (both to Martin et al.) and in WO 94/20073 (Zalipsky et al.) Liposomes comprising PEG-modified ceramide lipids are described in WO 96/10391 (Choi et al.). U.S. Pat. No. 5,540,935 (Miyazaki et al.) and U.S. Pat. No. 5,556,948 (Tagawa et al.) describe PEG-containing liposomes that can be further derivatized with functional moieties on their surfaces.

[0092] A limited number of liposomes comprising nucleic acids are known in the art. WO 96/40062 to Thierry et al. discloses methods for encapsulating high molecular weight nucleic acids in liposomes. U.S. Pat. No. 5,264,221 to Tagawa et al. discloses protein-bonded liposomes and asserts that the contents of such liposomes may include an antisense RNA. U.S. Pat. No. 5,665,710 to Rahman et al. describes certain methods of encapsulating oligodeoxynucleotides in liposomes. WO 97/04787 to Love et al. discloses liposomes comprising antisense oligonucleotides targeted to the raf gene.

[0093] Transfersomes are yet another type of liposomes, and are highly deformable lipid aggregates which are attractive candidates for drug delivery vehicles. Transfersomes may be described as lipid droplets that are so highly deformable that they are easily able to penetrate through pores that are smaller than the droplet. Transfersomes are adaptable to the environment in which they are used, e.g. they are self-optimizing (adaptive to the shape of pores in the skin), self-repairing, frequently reach their targets without fragmenting, and often self-loading. To make transfersomes it is possible to add surface edgeactivators, usually surfactants, to a standard liposomal composition. Transfersomes have been used to deliver serum albumin to the skin. The transfersome-mediated delivery of serum albumin has been shown to be as effective as subcutaneous injection of a solution containing serum albumin.

[0094] Surfactants find wide application in formulations such as emulsions (including microemulsions) and liposomes. The most common way of classifying and ranking the properties of the many different types of surfactants, both natural and synthetic, is by the use of the hydrophile/lipophile balance (HLB). The nature of the hydrophilic group (also known as the “head”) provides the most useful means for categorizing the different surfactants used in formulations (Rieger, in Pharmaceutical Dosage Forms, Marcel Dekker, Inc., New York, N.Y., 1988, p. 285).

[0095] If the surfactant molecule is not ionized, it is classified as a nonionic surfactant. Nonionic surfactants find wide application in pharmaceutical and cosmetic products and are usable over a wide range of pH values. In general their HLB values range from 2 to about 18 depending on their structure. Nonionic surfactants include nonionic esters such as ethylene glycol esters, propylene glycol esters, glyceryl esters, polyglyceryl esters, sorbitan esters, sucrose esters, and ethoxylated esters. Nonionic alkanolamides and ethers such as fatty alcohol ethoxylates, propoxylated alcohols, and ethoxylated/propoxylated block polymers are also included in this class. The polyoxyethylene surfactants are the most popular members of the nonionic surfactant class.

[0096] If the surfactant molecule carries a negative charge when it is dissolved or dispersed in water, the surfactant is classified as anionic. Anionic surfactants include carboxylates such as soaps, acyl lactylates, acyl amides of amino acids, esters of sulfuric acid such as alkyl sulfates and ethoxylated alkyl sulfates, sulfonates such as alkyl benzene sulfonates, acyl isethionates, acyl taurates and sulfosuccinates, and phosphates. The most important members of the anionic surfactant class are the alkyl sulfates and the soaps.

[0097] If the surfactant molecule carries a positive charge when it is dissolved or dispersed in water, the surfactant is classified as cationic. Cationic surfactants include quaternary ammonium salts and ethoxylated amines. The quaternaly ammonium salts are the most used members of this class.

[0098] If the surfactant molecule has the ability to carry either a positive or negative charge, the surfactant is classified as amphoteric. Amphoteric surfactants include acrylic acid derivatives, substituted alkylamides, N-alkylbetaines, and phosphatides.

[0099] The use of surfactants in drug products, formulations and in emulsions has been reviewed (Rieger, in Pharmaceutical Dosage Forms, Marcel Dekker, Inc., New York, N.Y., 1988, p. 285).

[0100] Penetration Enhancers

[0101] In one embodiment, the present invention employs various penetration enhancers to effect the efficient delivery of nucleic acids particularly oligonucleotides, to the skin of animals. Most drugs are present in solution in both ionized and nonionized forms. However, usually only lipid soluble or lipophilic drugs readily cross cell membranes. It has been discovered that even non-lipophilic drugs may cross cell membranes if the membrane to be crossed is treated with a penetration enhancer. In addition to aiding the diffusion of non-lipophilic drugs across cell membranes, penetration enhancers also enhance the permeability of lipophilic drugs.

[0102] Penetration enhancers may be classified as belonging to one of five broad categories, i.e., surfactants, fatty acids, bile salts, chelating agents, and non-chelating nonsurfactants (Lee et al., Critical Reviews in Therapeutic Drug Carrier Systems, 1991, p.92). Each of the above mentioned classes of penetration enhancers are described below in greater detail.

[0103] Surfactants: In connection with the present invention, surfactants (or “surface-active agents”) are chemical entities which, when dissolved in an aqueous solution, reduce the surface tension of the solution or the interfacial tension between the aqueous solution and another liquid, with the result that absorption of oligonucleotides through the mucosa is enhanced. In addition to bile salts and fatty acids, these penetration enhancers include, for example, sodium lauryl sulfate, polyoxyethylene-9-lauryl ether and polyoxyethylene-20-cetyl ether) (Lee et al., Critical Reviews in Therapeutic Drug Carrier Systems, 1991, p.92); and perfluorochemical emulsions, such as FC-43. Takahashi et al., J. Pharm. Pharmacol., 1988, 40, 252).

[0104] Fatty acids: Various fatty acids and their derivatives which act as penetration enhancers include, for example, oleic acid, lauric acid, capric acid (n-decanoic acid), myristic acid, palmitic acid, stearic acid, linoleic acid, linolenic acid, dicaprate, tricaprate, monoolein (1-monooleoyl-.rac-glycerol), dilaurin, caprylic acid, arachidonic acid, glycerol 1-monocaprate, 1-dodecylazacycloheptan-2-one, acylcamitines, acylcholines, C1-10 alkyl esters thereof (e.g., methyl, isopropyl and t-butyl), and mono- and di-glycerides thereof (i.e., oleate, laurate, caprate, myristate, palmitate, stearate, linoleate, etc.) (Lee et al., Critical Reviews in Therapeutic Drug Carrier Systems, 1991, p.92; Muranishi, Critical Reviews in Therapeutic Drug Carrier Systems, 1990, 7, 1-33; El Hariri et al., J. Pharm. Pharmacol., 1992, 44, 651-654).

[0105] Bile salts: The physiological role of bile includes the facilitation of dispersion and absorption of lipids and fat-soluble vitamins (Brunton, Chapter 38 in: Goodman & Gilman's The Pharmacological Basis of Therapeutics, 9th Ed., Hardman et al. Eds. McGraw-Hill, New York, 1996, pp. 934-935). Various natural bile salts, and their synthetic derivatives, act as penetration enhancers. Thus the term “bile salts” includes any of the naturally occurring components of bile as well as any of their synthetic derivatives. The bile salts of the invention include, for example, cholic acid (or its pharmaceutically acceptable sodium salt, sodium cholate), dehydrocholic acid (sodium dehydrocholate), deoxycholic acid (sodium deoxycholate), glucholic acid (sodium glucholate), glycholic acid (sodium glycocholate), glycodeoxycholic acid (sodium glycodeoxycholate), taurocholic acid (sodium taurocholate), taurodeoxycholic acid (sodium taurodeoxycholate), chenodeoxycholic acid (sodium chenodeoxycholate), ursodeoxycholic acid (UDCA), sodium tauro-24,25-dihydro-fusidate (STDHF), sodium glycodihydrofusidate‘ and polyoxyethylene-9-lauryl ether (POE) (Lee et al., Critical Reviews in Therapeutic Drug Carrier Systems, 1991, page 92; Swinyard, Chapter 39 In: Remington's Pharmaceutical Sciences, 18th Ed., Gennaro, ed., Mack Publishing Co., Easton, Pa., 1990, pages 782-783; Muranishi, Critical Reviews in Therapeutic Drug Carrier Systems, 1990, 7, 1-33; Yamamoto et al., J. Pharm. Exp. Ther., 1992, 263, 25; Yamashita et al., J. Pharm. Sci., 1990, 79, 579-583).

[0106] Chelating Agents: Chelating agents, as used in connection with the present invention, can be defined as compounds that remove metallic ions from solution by forming complexes therewith, with the result that absorption of oligonucleotides through the mucosa is enhanced. With regards to their use as penetration enhancers in the present invention, chelating agents have the added advantage of also serving as DNase inhibitors, as most characterized DNA nucleases require a divalent metal ion for catalysis and are thus inhibited by chelating agents (Jarrett, J. Chromatogr., 1993, 618, 315-339). Chelating agents of the invention include but are not limited to disodium ethylenediaminetetraacetate (EDTA), citric acid, salicylates (e.g., sodium salicylate, 5-methoxysalicylate and homovanilate), N-acyl derivatives of collagen, laureth-9 and N-amino acyl derivatives of beta-diketones (enamines)(Lee et al., Critical Reviews in Therapeutic Drug Carrier Systems, 1991, page 92; Muranishi, Critical Reviews in Therapeutic Drug Carrier Systems, 1990, 7, 1-33; Buur et al., J. Control Rel., 1990, 14, 43-51).

[0107] Non-chelating non-surfactants: As used herein, nonchelating non-surfactant penetration enhancing compounds can be defined as compounds that demonstrate insignificant activity as chelating agents or as surfactants but that nonetheless enhance absorption of oligonucleotides through the alimentary mucosa (Muranishi, Critical Reviews in Therapeutic Drug Carrier Systems, 1990, 7, 1-33). This class of penetration enhancers includes, for example, unsaturated cyclic ureas, 1-alkyl- and 1-alkenylazacyclo-alkanone derivatives (Lee et al., Critical Reviews in Therapeutic Drug Carrier Systems, 1991, page 92); and non-steroidal anti-inflammatory agents such as diclofenac sodium, indomethacin, and phenylbutazone (Yamashita et al., J. Pharm. Pharmacol., 1987, 39, 621-626).

[0108] Agents that enhance uptake of oligonucleotides at the cellular level may also be added to the pharmaceutical and other compositions of the present invention. For example, cationic lipids, such as lipofectin (Junichi et al, U.S. Pat. No. 5,705,188), cationic glycerol derivatives, and polycationic molecules, such as polylysine (Lollo et al., PCT Application WO 97/30731), are also known to enhance the cellular uptake of oligonucleotides.

[0109] Other agents may be utilized to enhance the penetration of the administered nucleic acids, including glycols such as ethylene glycol and propylene glycol, pyrrols such as 2-pyrrol, azones, and terpenes such as limonene and menthone.

[0110] Carriers

[0111] Certain compositions of the present invention also incorporate carrier compounds in the formulation. As used herein, “carrier compound” or “carrier” can refer to a nucleic acid, or analog thereof, which is inert (i.e., does not possess biological activity per se) but is recognized as a nucleic acid by in vivo processes that reduce the bioavailability of a nucleic acid having biological activity by, for example, degrading the biologically active nucleic acid or promoting its removal from circulation. The coadministration of a nucleic acid and a carrier compound, typically with an excess of the latter substance, can result in a substantial reduction of the amount of nucleic acid recovered in the liver, kidney or other extracirculatory reservoirs, presumably due to competition between the carrier compound and the nucleic acid for a common receptor. For example, the recovery of a partially phosphorothioate oligonucleotide in hepatic tissue can be reduced when it is coadministered with polyinosinic acid, dextran sulfate, polycytidic acid or 4-acetamido-4′isothiocyano-stilbene-2,2′disulfonic acid (Miyao et al., Antisense Res. Dev., 1995, 5, 115-121; Takakura et al., Antisense & Nucl. Acid Drug Dev., 1996, 6, 177-183).

[0112] Excipients

[0113] In contrast to a carrier compound, a “pharmaceutical carrier” or “excipient” is a pharmaceutically acceptable solvent, suspending agent or any other pharmacologically inert vehicle for delivering one or more nucleic acids to an animal. The excipient may be liquid or solid and is selected, with the planned manner of administration in mind, so as to provide for the desired bulk, consistency, etc., when combined with a nucleic acid and the other components of a given pharmaceutical composition. Typical pharmaceutical carriers include, but are not limited to, binding agents (e.g., pregelatinized maize starch, polyvinylpyrrolidone or hydroxypropyl methylcellulose, etc.); fillers (e.g., lactose and other sugars, microcrystalline cellulose, pectin, gelatin, calcium sulfate, ethyl cellulose, polyacrylates or calcium hydrogen phosphate, etc.); lubricants (e.g., magnesium stearate, talc, silica, colloidal silicon dioxide, stearic acid, metallic stearates, hydrogenated vegetable oils, corn starch, polyethylene glycols, sodium benzoate, sodium acetate, etc.); disintegrants (e.g., starch, sodium starch glycolate, etc.); and wetting agents (e.g., sodium lauryl sulphate, etc.).

[0114] Pharmaceutically acceptable organic or inorganic excipient suitable for non-parenteral administration, which does not deleteriously react with nucleic acids, can also be used to formulate the compositions of the present invention. Suitable pharmaceutically acceptable carriers include, but are not limited to, water, salt solutions, alcohols, polyethylene glycols, gelatin, lactose, amylose, magnesium stearate, talc, silicic acid, viscous paraffin, hydroxymethyl cellulose, polyvinylpyrrolidone and the like.

[0115] Formulations for topical administration of nucleic acids may include sterile and non-sterile aqueous solutions, non-aqueous solutions in common solvents such as alcohols, or solutions of the nucleic acids in liquid or solid oil bases. The solutions may also contain buffers, diluents, and other suitable additives. Pharmaceutically acceptable organic or inorganic excipients suitable for non-parenteral administration that do not deleteriously react with nucleic acids can be used.

[0116] Suitable pharmaceutically acceptable excipients include, but are not limited to, water, salt solutions, alcohol, polyethylene glycols, gelatin, lactose, amylose, magnesium stearate, talc, silicic acid, viscous paraffin, hydroxymethyl cellulose, polyvinylpyrrolidone and the like.

[0117] Other Components

[0118] The compositions of the present invention may additionally contain other adjunct components conventionally found in pharmaceutical compositions, at their art-established usage levels. Thus, for example, the compositions may contain additional, compatible, pharmaceutically-active materials such as, for example, antipruritics, astringents, local anesthetics or anti-inflammatory agents, or may contain additional materials useful in physically formulating various dosage forms of the compositions of the present invention, such as dyes, flavoring agents, preservatives, antioxidants, opacifiers, thickening agents and stabilizers. However, such materials, when added, should not unduly interfere with the biological activities of the components of the compositions of the present invention.‘ The formulations can be sterilized and, if desired, mixed with auxiliary agents, e.g., lubricants, preservatives, stabilizers, wetting agents, emulsifiers, salts for influencing osmotic pressure, buffers, colorings, flavorings and/or aromatic substances and the like which do not deleteriously interact with the nucleic acid(s) of the formulation.

[0119] Aqueous suspensions may contain substances that increase the viscosity of the suspension including, for example, sodium carboxymethyl cellulose, sorbitol, and/or dextran. The suspension may also contain stabilizers.

[0120] Certain embodiments of the invention provide pharmaceutical compositions containing (a) one or more antisense compounds and (b) one or more other chemotherapeutic agents which function by a non-antisense mechanism. Examples of such chemotherapeutic agents include, but are not limited to, anticancer drugs such as daunorubicin, dactinomycin, doxorubicin, bleomycin, mitomycin, nitrogen mustard, chlorambucil, melphalan, cyclophosphamide, 6-mercaptopurine, 6-thioguanine, cytarabine (CA), 5-fluorouracil (5-FU), floxuridine (5-FUdR), methotrexate (MTX), colchicine, vincristine, vinblastine, etoposide, teniposide, cisplatin and diethylstilbestrol (DES). See, generally, The Merck Manual of Diagnosis and Therapy, 15th Ed., Berkow et al., eds., 1987, Rahway, N.J., pages 1206-1228). Anti-inflammatory drugs, including but not limited to nonsteroidal anti-inflammatory drugs and corticosteroids, and antiviral drugs, including but not limited to ribivirin, vidarabine, acyclovir and ganciclovir, may also be combined in compositions of the invention. See, generally, The Merck Manual of Diagnosis and Therapy, 15th Ed., Berkow et al., eds., 1987, Rahway, N.J., pages 2499-2506 and 46-49, respectively) other non-antisense chemotherapeutic agents are also within the scope of this invention. Two or more combined compounds may be used together or sequentially.

[0121] In another related embodiment, compositions of the invention may contain one or more antisense compounds, particularly oligonucleotides, targeted to a first nucleic acid and one or more additional antisense compounds targeted to a second nucleic acid target. Numerous examples of antisense compounds are known in the art. Two or more combined compounds may be used together or sequentially.

[0122] The formulation of therapeutic compositions and their subsequent administration is believed to be within the skill of those in the art. Dosing is dependent on severity and responsiveness of the disease state to be treated, with the course of treatment lasting from several days to several months, or until a cure is effected or a diminution of the disease state is achieved. Optimal dosing schedules can be calculated from measurements of drug accumulation in the body of the patient. Persons of ordinary skill can easily determine optimum dosages, dosing methodologies and repetition rates. Optimum dosages may vary depending on the relative potency of individual oligonucleotides, and can generally be estimated based on EC50s found to be effective in in vitro and in vivo animal models. In general, dosage is from 0.01 μg to 100 g per kg of body weight, and may be given once or more daily, weekly, monthly or yearly, or even once every 2 to 20 years. Persons of ordinary skill in the art can easily estimate repetition rates for dosing based on measured residence times and concentrations of the drug in bodily fluids or tissues. Following successful treatment, it may be desirable to have the patient undergo maintenance therapy to prevent the recurrence of the disease state, wherein the oligonucleotide is administered in maintenance doses, ranging from 0.01 μg to 100 g per kg of body weight, once or more daily, to once every 20 years.

[0123] While the present invention has been described with specificity in accordance with certain of its preferred embodiments, the following examples serve only to illustrate the invention and are not intended to limit the same.

### EXAMPLES

### Example 1

### Nucleoside Phosphoramidites for Oligonucleotide Synthesis Deoxy and 2′-Alkoxy Amidites

[0124] 2′-Deoxy and 2′-methoxy beta-cyanoethyldiisopropyl phosphoramidites are available from commercial sources (e.g. Chemgenes, Needham Mass. or Glen Research, Inc. Sterling Va.). Other 2′-O-alkoxy substituted nucleoside amidites are prepared as described in U.S. Pat. No. 5,506,351, herein incorporated by reference. For oligonucleotides synthesized using 2′-alkoxy amidites, the standard cycle for unmodified oligonucleotides is utilized, except the wait step after pulse delivery of tetrazole and base is increased to 360 seconds.

[0125] Oligonucleotides containing 5-methyl-2′-deoxycytidine (5-Me-C) nucleotides are synthesized according to published methods [Sanghvi, et. al., Nucleic Acids Research, 1993,21, 3197-3203] using commercially available phosphoramidites (Glen Research, Sterling Va. or ChemGenes, Needham Mass.).

[0126] 2′-Fluoro Amidites

[0127] 2′-Fluorodeoxyadenosine Amidites

[0128] 2′-fluoro oligonucleotides are synthesized as described previously [Kawasaki, et. al., J. Med. Chem., 1993, 36, 831-841] and U.S. Pat. No. 5,670,633, herein incorporated by reference. Briefly, the protected nucleoside N6-benzoyl-2′-deoxy-2′-fluoroadenosine is synthesized utilizing commercially available 9-beta-D-arabinofuranosyladenine as starting material and by modifying literature procedures whereby the 2′-alpha-fluoro atom is introduced by a S_{N}2-displacement of a 2′-beta-trityl group. Thus N6-benzoyl-9-beta-D-arabinofuranosyladenine is selectively protected in moderate yield as the 3′,5′-ditetrahydropyranyl (THP) intermediate. Deprotection of the THP and N6-benzoyl groups is accomplished using standard methodologies and standard methods are used to obtain the 5′-dimethoxytrityl-(DMT) and 5′-DMT-3′-phosphoramidite intermediates.

[0129] 2′-Fluorodeoxyguanosine

[0130] The synthesis of 2′-deoxy-2′-fluoroguanosine is accomplished using tetraisopropyldisiloxanyl (TPDS) protected 9-beta-D-arabinofuranosylguanine as starting material, and conversion to the intermediate diisobutyrylarabinofuranosylguanosine. Deprotection of the TPDS group is followed by protection of the hydroxyl group with THP to give diisobutyryl di-THP protected arabinofuranosylguanine. Selective O-deacylation and triflation is followed by treatment of the crude product with fluoride, then deprotection of the THP groups. Standard methodologies are used to obtain the 5′-DMT- and 5′-DMT-3′-phosphoramidites.

[0131] 2′-Fluorouridine

[0132] Synthesis of 2′-deoxy-2′-fluorouridine is accomplished by the modification of a literature procedure in which 2,2′anhydro-1-beta-D-arabinofuranosyluracil is treated with 70% hydrogen fluoride-pyridine. Standard procedures are used to obtain the 5′-DMT and 5′-DMT-3′-phosphoramidites.

[0133] 2′-Fluorodeoxycytidine

[0134] 2′-deoxy-2′-fluorocytidine is synthesized via amination of 2′-deoxy-2′-fluorouridine, followed by selective protection to give N4-benzoyl-2′-deoxy-2′-fluorocytidine. Standard procedures are used to obtain the 5′-DMT and 5′-DMT-3′phosphoramidites.

[0135] 2′-O-(2-Methoxyethyl) Modified Amidites

[0136] 2′-O-Methoxyethyl-substituted nucleoside amidites are prepared as follows, or alternatively, as per the methods of Martin, P., Helvetica Chimica Acta, 1995, 78, 486-504.

[0137] 2,2′-Anhydro[1-(beta-D-arabinofuranosyl)-5-methyluridinel

[0138] 5-Methyluridine (ribosylthymine, commercially available through Yamasa, Choshi, Japan) (72.0 g, 0.279 M), diphenylcarbonate (90.0 g, 0.420 M) and sodium bicarbonate (2.0 g, 0.024 M) are added to DMF (300 mL). The mixture is heated to reflux, with stirring, allowing the evolved carbon dioxide gas to be released in a controlled manner. After 1 hour, the slightly darkened solution is concentrated under reduced pressure. The resulting syrup is poured into diethylether (2.5 L), with stirring. The product formed a gum. The ether is decanted and the residue is dissolved in a minimum amount of methanol (ca. 400 mL). The solution is poured into fresh ether (2.5 L) to yield a stiff gum. The ether is decanted and the gum is dried in a vacuum oven (60° C. at 1 mm Hg for 24 h) to give a solid that is crushed to a light tan powder. The material is used as is for further reactions (or it can be purified further by column chromatography using a gradient of methanol in ethyl acetate (10-25%) to give a white solid.

[0139] 2′-O-Methoxyethyl-5-methyluridine

[0140] 2,2′-Anhydro-5-methyluridine (195 g, 0.81 M), tris(2-methoxyethyl)borate (231 g, 0.98 M) and 2-methoxyethanol (1.2 L) are added to a 2 L stainless steel pressure vessel and placed in a pre-heated oil bath at 160° C. After heating for 48 hours at 155-160° C., the vessel is opened and the solution evaporated to dryness and triturated with MeOH (200 mL). The residue is suspended in hot acetone (1 L). The insoluble salts are filtered, washed with acetone (150 mL) and the filtrate evaporated. The residue (280 g) is dissolved in CH₃CN (600 mL) and evaporated. A silica gel column (3 kg) is packed in CH₂Cl₂/acetone/MeOH (20:5:3) containing 0.5% Et₃NH. The residue is dissolved in CH₂Cl₂ (250 mL) and adsorbed onto silica (150 g) prior to loading onto the column. The product is eluted with the packing solvent to give the title product. Additional material can be obtained by reworking impure fractions.

[0141] 2′-O-Methoxyethyl-5′-O-dimethoxytrityl-5-methyluridine

[0142] 2′-O-Methoxyethyl-5-methyluridine (160 g, 0.506 M) is co-evaporated with pyridine (250 mL) and the dried residue dissolved in pyridine (1.3 L). A first aliquot of dimethoxytrityl chloride (94.3 g, 0.278 M) is added and the mixture stirred at room temperature for one hour. A second aliquot of dimethoxytrityl chloride (94.3 g, 0.278 M) is added and the reaction stirred for an additional one hour. Methanol (170 mL) is then added to stop the reaction. The solvent is evaporated and triturated with CH₃CN (200 mL) The residue is dissolved in CHCl (1.5 L) and extracted with 2×500 mL of saturated NaHCO₃ and 2×500 mL of saturated NaCl. The organic phase is dried over Na₂SO₄, filtered, and evaporated. The residue is purified on a 3.5 kg silica gel column, packed and eluted with EtOAc/hexane/acetone (5:5:1) containing 0-5% Et₃NH. The pure fractions are evaporated to give the title product.

[0143] 3′-O-Acetyl-2′-O-methoxyethyl-5′-O-dimethoxytrityl-5-methyluridine

[0144] 2′-O-Methoxyethyl-5′-O-dimethoxytrityl-5-methyluridine (106 g, 0.167 M), DMF/pyridine (750 mL of a 3:1 mixture prepared from 562 mL of DMF and 188 mL of pyridine) and acetic anhydride (24.38 mL, 0.258 M) are combined and stirred at room temperature for 24 hours. The reaction is monitored by TLC by first quenching the TLC sample with the addition of MeOH. Upon completion of the reaction, as judged by TLC, MeOH (50 mL) is added and the mixture evaporated at 35° C. The residue is dissolved in CHCl₃ (800 mL) and extracted with 2×200 mL of saturated sodium bicarbonate and 2×200 mL of saturated NaCl. The water layers are back extracted with 200 mL of CHCl₃. The combined organics are dried with sodium sulfate and evaporated to a residue. The residue is purified on a 3.5 kg silica gel column and eluted using EtOAc/hexane(4:1). Pure product fractions are evaporated to yield the title compounds.

[0145] 3′-O-Acetyl-2′-O-methoxyethyl-5′-O-dimethoxytrityl-5-methyl-4-triazoleuridine

[0146] A first solution is prepared by dissolving 3′-O-acetyl-2′-O-methoxyethyl-5′-O-dimethoxytrityl-5-methyluridine (96 g, 0.144 M) in CH₃CN (700 mL) and set aside. Triethylamine (189 mL, 1.44 M) is added to a solution of triazole (90 g, 1.3 M) in CH₃CN (1 L), cooled to −5° C. and stirred for 0.5 h using an overhead stirrer. POCl₃ is added dropwise, over a 30 minute period, to the stirred solution maintained at 0-10° C., and the resulting mixture stirred for an additional 2 hours. The first solution is added dropwise, over a 45 minute period, to the latter solution. The resulting reaction mixture is stored overnight in a cold room. Salts are filtered from the reaction mixture and the solution is evaporated. The residue is dissolved in EtOAc (1 L) and the insoluble solids are removed by filtration. The filtrate is washed with 1×300 mL of NaHCO₃ and 2×300 mL of saturated NaCl, dried over sodium sulfate and evaporated. The residue is triturated with EtOAc to give the title compound.

[0147] 2′-O-Methoxyethyl-5′-O-dimethoxytrityl-5-methylcytidine

[0148] A solution of 3′-O-acetyl-2′-O-methoxyethyl-5′-O-dimethoxytrityl-5-methyl-4-triazoleuridine (103 g, 0.141 M) in dioxane (500 mL) and NH₄OH (30 mL) is stirred at room temperature for 2 hours. The dioxane solution is evaporated and the residue azeotroped with MeOH (2×200 mL). The residue is dissolved in MeOH (300 mL) and transferred to a 2-liter stainless steel pressure vessel. MeOH (400 mL) saturated with NH₃ gas is added and the vessel heated to 100° C. for 2 hours (TLC showed complete conversion). The vessel contents are evaporated to dryness and the residue is dissolved in EtOAc (500 mL) and washed once with saturated NaCl (200 mL). The organics are dried over sodium sulfate and the solvent is evaporated to give the title compound.

[0149] N4-Benzoyl-2′-O-methoxyethyl-5′-O-dimethoxytrityl-5-methylcytidine

[0150] 2′-O-Methoxyethyl-5′-O-dimethoxytrityl-5-methylcytidine (85 g, 0.134 M) is dissolved in DMF (800 mL) and benzoic anhydride (37.2 g, 0.165 M) is added with stirring. After stirring for 3 hours, TLC showed the reaction to be approximately 95% complete. The solvent is evaporated and the residue azeotroped with MeOH (200 mL). The residue is dissolved in CHCl₃ (700 mL) and extracted with saturated NaHCO, (2×300 mL) and saturated NaCl (2×300 mL), dried over MgSO₄ and evaporated to give a residue. The residue is chromatographed on a 1.5 kg silica column using EtOAc/hexane (1:1) containing 0-5% Et₃NH as the eluting solvent. The pure product fractions are evaporated to give the title compound.

[0151] N4-Benzoyl-2′-O-methoxyethyl-5′-O-dimethoxytrityl-5-methylcytidine-3′-amidite

[0152] N4-Benzoyl-2′-O-methoxyethyl-5′-O-dimethoxytrityl-5-methylcytidine (74 g, 0.10 M) is dissolved in CH₂Cl₂ (1 L) Tetrazole diisopropylamine (7.1 g) and 2-cyanoethoxy-tetra(isopropyl)phosphite (40.5 mL, 0.123 M) are added with stirring, under a nitrogen atmosphere. The resulting mixture is stirred for 20 hours at room temperature (TLC showed the reaction to be 95% complete). The reaction mixture is extracted with saturated NaHCO₃ (1×300 mL) and saturated NaCl (3×300 mL). The aqueous washes are back-extracted with CH₂Cl₂ (300 mL), and the extracts are combined, dried over MgSO₄, and concentrated. The residue obtained is chromatographed on a 1.5 kg silica column using EtOAc/hexane (3:1) as the eluting solvent. The pure fractions were combined to give the title compound.

[0153] 2′-O-(Aminooxyethyl) nucleoside amidites and 2′-O-(dimethylaminooxyethyl) Nucleoside Amidites

[0154] 2′-(Dimethylaminooxyethoxy) Nucleoside Amidites

[0155] 2′-(Dimethylaminooxyethoxy) nucleoside amidites [also known in the art as 2′-O-(dimethylaminooxyethyl) nucleoside amidites] are prepared as described in the following paragraphs. Adenosine, cytidine and guanosine nucleoside amidites are prepared similarly to the thymidine (5-methyluridine) except the exocyclic amines are protected with a benzoyl moiety in the case of adenosine and cytidine and with isobutyryl in the case of guanosine.

[0156] 5′-O-tert-Butyldiphenylsilyl-O²-2′-anhydro-5-methyluridine

[0157] O²-2′-anhydro-5-methyluridine (Pro. Bio. Sint., Varese, Italy, 100.0 g, 0.4′6 mmol), dimethylaminopyridine (0.66 g, 0.013 eq, 0.0054 mmol) are dissolved in dry pyridine (500 ml) at ambient temperature under an argon atmosphere and with mechanical stirring tert-Butyldiphenylchlorosilane (125.8 g, 119.0 mL, 1.1 eq, 0.458 mmol) is added in one portion. The reaction is stirred for 16 h at ambient temperature. TLC (Rf 0.22, ethyl acetate) indicated a complete reaction. The solution is concentrated under reduced pressure to a thick oil. This is partitioned between dichloromethane (1 L) and saturated sodium bicarbonate (2×1 L) and brine (1 L). The organic layer is dried over sodium sulfate and concentrated under reduced pressure to a thick oil. The oil is dissolved in a 1:1 mixture of ethyl acetate and ethyl ether (600 mL) and the solution is cooled to −10° C. The resulting crystalline product is collected by filtration, washed with ethyl ether (3×200 mL), and dried (40° C., 1 mm Hg, 24 h) to a white solid.

[0158] 5′-O-tert-Butyldiphenylsilyl-2′-O-(2-hydroxyethyl)-5-methyluridine

[0159] In a 2 L stainless steel, unstirred pressure reactor is added borane in tetrahydrofuran (1.0 M, 2.0 eq, 622 mL). In the fume hood and with manual stirring, ethylene glycol (350 mL, excess) is added cautiously at first until the evolution of hydrogen gas subsides. 5′-O-tert-Butyldiphenylsilyl-O²-2′-anhydro-5-methyluridine (149 g, 0.3′1 mol) and sodium bicarbonate (0.074 g, 0.003 eq) are added with manual stirring. The reactor is sealed and heated in an oil bath until an internal temperature of 160° C. is reached and then maintained for 16 h (pressure <100 psig). The reaction vessel is cooled to ambient and opened. TLC (Rf 0.67 for desired product and Rf 0.82 for ara-T side product, ethyl acetate) indicated about 70% conversion to the product. In order to avoid additional side product formation, the reaction is stopped, concentrated under reduced pressure (10 to 1 mm, Hg) in a warm water bath (40-100° C.) with the more extreme conditions used to remove the ethylene glycol. [Alternatively, once the low boiling solvent is gone, the remaining solution can be partitioned between ethyl acetate and water. The product will be in the organic phase.] The residue is purified by column chromatography (2 kg silica gel, ethyl acetate-hexanes gradient 1:1 to 4:1). The appropriate fractions are combined, stripped, and dried to product as a white crisp foam, contaminated starting material, and pure reusable starting material.

[0160] 2′-O-([2-phthalimidoxy)ethyl]-5′-t-butyldiphenylsilyl-5-methyluridine

[0161] 5′-O-tert-Butyldiphenylsilyl-2′-O-(2-hydroxyethyl)-5-methyluridine (20 g, 36.98 mmol) is mixed with triphenylphosphine (11.63 g, 44.36 mmol) and N-hydroxyphthalimide (7.24 g, 44.36 mmol). It is then dried over P₂O₅ under high vacuum for two days at 40° C. The reaction mixture is flushed with argon and dry THF (369.8 mL, Aldrich, sure seal bottle) is added to get a clear solution. Diethyl-azodicarboxylate (6.98 mL, 44.36 mmol) is added dropwise to the reaction mixture. The rate of addition is maintained such that resulting deep red coloration is just discharged before adding the next drop. After the addition is complete, the reaction is stirred for 4 hrs. By that time TLC showed the completion of the reaction (ethylacetate:hexane, 60:40). The solvent is evaporated in vacuum. Residue obtained is placed on a flash column and eluted with ethyl acetate:hexane (60:40), to get 2′-O-([2-phthalimidoxy)ethyl]-5′-t-butyldiphenylsilyl-5-methyluridine as white foam.

[0162] 5′-O-tert-butyldiphenylsilyl-2′-O-[(2-formadoximinooxy)ethyl]-5-methyluridine

[0163] 2′-O-([2-phthalimidoxy)ethyl]-5′-t-butyldiphenylsilyl-5-methyluridine (3.1 g, 4.5 mmol) is dissolved in dry CH₂Cl₂ (4.5 mL) and methylhydrazine (300 mL, 4.64 mmol) is added dropwise at −10° C. to 0° C. After 1 h the mixture is filtered, the filtrate is washed with ice cold CH₂Cl₂ and the combined organic phase is washed with water, brine and dried over anhydrous Na₂SO₄. The solution is concentrated to get 2′-O(aminooxyethyl) thymidine, which is then dissolved in MeOH (67.5 mL). To this formaldehyde (20% aqueous solution, w/w, 1.1 eq.) is added and the resulting mixture is stirred for 1 h. Solvent is removed under vacuum; residue chromatographed to get 5′-O-tert-butyldiphenylsilyl-2′-O-[(2-formadoximinooxy)ethyl]-5-methyluridine as white foam.

[0164] 5′-O-tert-Butyldiphenylsilyl-2′-O-[N,N-dimethylaminooxyethyl]-5-methyluridine

[0165] 5′-O-tert-butyldiphenylsilyl-2′-O-[(2-formadoximinooxy)ethyl]-5-methyluridine (1.77 g, 3.12 mmol) is dissolved in a solution of 1M pyridinium p-toluenesulfonate (PPTS) in dry MeOH (30.6 mL). Sodium cyanoborohydride (0.39 g, 6.13 mmol) is added to this solution at 10° C. under inert atmosphere. The reaction mixture is stirred for 10 minutes at 10° C. After that the reaction vessel is removed from the ice bath and stirred at room temperature for 2 h, the reaction monitored by TLC (5% MeOH in CH₂Cl₂). Aqueous NaHCO₃ solution (5%, 10 mL) is added and extracted with ethyl acetate (2×20 mL). Ethyl acetate phase is dried over anhydrous Na₂SO₄, evaporated to dryness. Residue is dissolved in a solution of 1M PPTS in MeOH (30.6 mL). Formaldehyde (20% w/w, 30 mL, 3.37 mmol) is added and the reaction mixture is stirred at room temperature for 10 minutes. Reaction mixture cooled to 10° C. in an ice bath, sodium cyanoborohydride (0.39 g, 6.13 mmol) is added, and reaction mixture stirred at 10° C. for 10 minutes. After 10 minutes, the reaction mixture is removed from the ice bath and stirred at room temperature for 2 hrs. To the reaction mixture 5% NaHCO₃ (25 mL) solution is added and extracted with ethyl acetate (2×25 mL). Ethyl acetate layer is dried over anhydrous Na₂SO₄ and evaporated to dryness. The residue obtained is purified by flash column chromatography and eluted with 5% MeOH in CH₂Cl₂ to get 5′-O-tertbutyldiphenylsilyl-2′-O-[N,N-dimethylaminooxyethyl]-5-methyluridine as a white foam.

[0166] 2′-O-(dimethylaminooxyethyl)-5-methyluridine

[0167] Triethylamine trihydrofluoride (3.91 mL, 24.0 mmol) is dissolved in dry THF and triethylamine (1.67 mL, 12 mmol, dry, kept over KOH). This mixture of triethylamine-2HF is then added to 5′-O-tert-butyldiphenylsilyl-2′-O-[N,N-dimethylaminooxyethyl]-5-methyluridine (1.40 g, 2.4 mmol) and stirred at room temperature for 24 hrs. Reaction is monitored by TLC (5% MeOH in CH₂Cl₂). Solvent is removed under vacuum and the residue placed on a flash column and eluted with 10% MeOH in CH₂Cl₂ to get 2′-O-(dimethylaminooxyethyl)-5-methyluridine.

[0168] 5′-O-DMT-2′-O-(dimethylaminooxyethyl)-5-methyluridine

[0169] 2′-O-(dimethylaminooxyethyl)-5-methyluridine (750 mg, 2.17 mmol) is dried over P₂O₅ under high vacuum overnight at 40° C. It is then co-evaporated with anhydrous pyridine (20 mL). The residue obtained is dissolved in pyridine (11 mL) under argon atmosphere. 4-dimethylaminopyridine (26.5 mg, 2.60 mmol), 4,4′-dimethoxytrityl chloride (880 mg, 2.60 mmol) is added to the mixture and the reaction mixture is stirred at room temperature until all of the starting material disappeared. Pyridine is removed under vacuum and the residue chromatographed and eluted with 10% MeOH in CH₂Cl₂ (containing a few drops of pyridine) to get 5′-O-DMT-2′-0(dimethylamino-oxyethyl)-5-methyluridine.

[0170] 5′-O-DMT-2′-O-(2-N,N-dimethylaminooxyethyl)-5-methyluridine-3′-[(2-cyanoethyl)-N,N-diisopropylphosphoramidite]

[0171] 5′-O-DMT-2′-O-(dimethylaminooxyethyl)-5-methyluridine (1.08 g, 1.67 mmol) is co-evaporated with toluene (20 mL). To the residue N,N-diisopropylamine tetrazonide (0.29 g, 1.67 mmol) is added and dried over P20, under high vacuum overnight at 40° C. Then the reaction mixture is dissolved in anhydrous acetonitrile (8.4 mL) and 2-cyanoethyl-N,N,N¹,N¹-tetraisopropylphosphoramidite (2.12 mL, 6.08 mmol) is added. The reaction mixture is stirred at ambient temperature for 4 hrs under inert atmosphere. The progress of the reaction is monitored by TLC (hexane:ethyl acetate 1:1). The solvent is evaporated, then the residue is dissolved in ethyl acetate (70 mL) and washed with 5% aqueous NaHCO₃ (40 mL). Ethyl acetate layer is dried over anhydrous Na₂SO₄ and concentrated. Residue obtained is chromatographed (ethyl acetate as eluent) to get 5′-O-DMT-2′-O-(2-N,N-dimethylaminooxyethyl)-5-methyluridine-3′-[(2-cyanoethyl)-N,N-diisopropylphosphoramidite] as a foam.

[0172] 2′-(Aminooxyethoxy) Nucleoside Amidites

[0173] 2′-(Aminooxyethoxy) nucleoside amidites [also known in the art as 2′-O-(aminooxyethyl) nucleoside amidites] are prepared as described in the following paragraphs. Adenosine, cytidine and thymidine nucleoside amidites are prepared similarly.

[0174] N2-isobutyryl-6-O-diphenylcarbamoyl-2′-O-(2-ethylacetyl)-5′-O-(4,4′-dimethoxytrityl)guanosine-3-[(2-cyanoethyl)-N,N-diisopropylphosphoramidite]

[0175] The 2′-O-aminooxyethyl guanosine analog may be obtained by selective 2′-O-alkylation of diaminopurine riboside. Multigram quantities of diaminopurine riboside may be purchased from Schering AG (Berlin) to provide 2′-O-(2-ethylacetyl) diaminopurine riboside along with a minor amount of the 3′-O-isomer. 2′-O-(2-ethylacetyl) diaminopurine riboside may be resolved and converted to 2′-O-(2ethylacetyl)guanosine by treatment with adenosine deaminase. (McGee, D. P. C., Cook, P. D., Guinosso, C. J., WO 94/02501 A1 940203.) Standard protection procedures should afford 2′-O-(2-ethylacetyl)-5′-O-(4,4′-dimethoxytrityl)guanosine and 2-N-isobutyryl-6-O-diphenylcarbamoyl-2′-O-(2-ethylacetyl)-5′-O-(4,4′-dimethoxytrityl)guanosine which may be reduced to provide 2-N-isobutyryl-6-O-diphenylcarbamoyl-2′-O-(2-ethylacetyl)-5′-O-(4,4′-dimethoxytrityl)guanosine. As before the hydroxyl group may be displaced by N-hydroxyphthalimide via a Mitsunobu reaction, and the protected nucleoside may phosphitylated as usual to yield 2-N-isobutyryl-6-O-diphenylcarbamoyl-2′-O-(2-ethylacethyl)-4′-O-)4,4′-dimethoxytrityl)guanosine-3′-[(2-cyanoethyl)-N,N-diisopropylphosphoramiditel.

[0176] 2′-dimethylaminoethoxyethoxy (2′-DMAEOE) nucleoside amidites

[0177] 2′-dimethylaminoethoxyethoxy nucleoside amidites (also known in the art as 2′-O-dimethylaminoethoxyethyl, i.e., 2′O—CH₂—O—CH₂—N(CH₂)₂, or 2′-DMAEOE nucleoside amidites) are prepared as follows. Other nucleoside amidites are prepared similarly.

[0178] 2′-O-[2(2-N,N-dimethylaminoethoxy)ethyl]-5-methyl uridine

[0179] 2[2-(Dimethylamino)ethoxylethanol (Aldrich, 6.66 g, 50 mmol) is slowly added to a solution of borane in tetrahydrofuran (1 M, 10 mL, 10 mmol) with stirring in a 100 mL bomb. Hydrogen gas evolves as the solid dissolves. O²—, 2′-anhydro-5-methyluridine (1.2 g, 5 mmol), and sodium bicarbonate (2.5 mg) are added and the bomb is sealed, placed in an oil bath, and heated to 155° C. for 26 hours. The bomb is cooled to room temperature and opened. The crude solution is concentrated and the residue partitioned between water (200 mL) and hexanes (200 mL). The excess phenol is extracted into the hexane layer. The aqueous layer is extracted with ethyl acetate (3×200 mL) and the combined organic layers are washed once with water, dried over anhydrous sodium sulfate, and concentrated. The residue is columned on silica gel using methanol/methylene chloride 1:20 (which has 2% triethylamine) as the eluent. As the column fractions are concentrated a colorless solid forms which is collected to give the title compound as a white solid.

[0180] 5′-O-dimethoxytrityl-2′-O-[2(2-N,N-dimethylaminoethoxy) ethyl)]-5-methyl uridine

[0181] To 0.5 g (1.3 mmol) of 2′-O-[2(2-N,N-dimethylaminoethoxy)ethyl)1-5-methyl uridine in anhydrous pyridine (8 mL), triethylamine (0.36 mL) and dimethoxytrityl chloride (DMT-Cl, 0.87 g, 2 eq.) are added and stirred for 1 hour. The reaction mixture is poured into water (200 mL) and extracted with CH₂Cl₂ (2×200 mL). The combined CH₂Cl₂ layers are washed with saturated NaHCO₃ solution, followed by saturated NaCl solution, and dried over anhydrous sodium sulfate. Evaporation of the solvent followed by silica gel chromatography using MeOH: CH₂Cl₂:Et₃N (20:1, v/v, with 1% triethylamine) gives the title compound.

[0182] 5′-O-Dimethoxytrityl-2′-O-[2(2-N,N-dimethylaminoethoxy)ethyl)]-5-methyl uridine-3′-O-(cyanoethyl-N,N-diisopropyl)phosphoramidite

[0183] Diisopropylaminotetrazolide (0.6 g) and 2-cyanoethoxyN,N-diisopropyl phosphoramidite (1.1 mL, 2 eq.) are added to a solution of 5′-O-dimethoxytrityl-2′-O-[2(2-N,N-dimethylaminoethoxy)ethyl)]-5-methyluridine (2.17 g, 3 mmol) dissolved in CH₂Cl₂ (20 mL) under an atmosphere of argon. The reaction mixture is stirred overnight and the solvent evaporated. The resulting residue is purified by silica gel flash column chromatography with ethyl acetate as the eluent to give the title compound.

### Example 2

### Oligonucleotide Synthesis

[0184] Unsubstituted and substituted phosphodiester (P═O) oligonucleotides are synthesized on an automated DNA synthesizer (Applied Biosystems model 380B) using standard phosphoramidite chemistry with oxidation by iodine.

[0185] Phosphorothioates (P═S) are synthesized as for the phosphodiester oligonucleotides except the standard oxidation bottle is replaced by 0.2 M solution of 3H-1,2-benzodithiole-3-one 1,1-dioxide in acetonitrile for the stepwise thiation of the phosphite linkages. The thiation wait step is increased to 68 sec and is followed by the capping step. After cleavage from the CPG column and deblocking in concentrated ammonium hydroxide at 55° C. (18 h), the oligonucleotides are purified by precipitating twice with 2.5 volumes of ethanol from a 0.5 M NaCl solution. Phosphinate oligonucleotides are prepared as described in U.S. Pat. No. 5,508,270, herein incorporated by reference.

[0186] Alkyl phosphonate oligonucleotides are prepared as described in U.S. Pat. No. 4,469,863, herein incorporated by reference.

[0187] 3′-Deoxy-3′-methylene phosphonate oligonucleotides are prepared as described in U.S. Pat. Nos. 5,610,289 or 5,625,050, herein incorporated by reference.

[0188] Phosphoramidite oligonucleotides are prepared as described in U.S. Pat. No. 5,256,775 or U.S. Pat. No. 5,366,878, herein incorporated by reference.

[0189] Alkylphosphonothioate oligonucleotides are prepared as described in WO 94/17093 and WO 94/02499 herein incorporated by reference.

[0190] 3′-Deoxy-3′-amino phosphoramidate oligonucleotides are prepared as described in U.S. Pat. No. 5,476,925, herein incorporated by reference.

[0191] Phosphotriester oligonucleotides are prepared as described in U.S. Pat. No. 5,023,243, herein incorporated by reference.

[0192] Borano phosphate oligonucleotides are prepared as described in U.S. Pat. Nos. 5,130,302 and 5,177,198, both herein incorporated by reference.

### Example 3

### Oligonucleoside Synthesis

[0193] Methylenemethylimino linked oligonucleosides, also identified as MMI linked oligonucleosides, methylenedimethylhydrazo linked oligonucleosides, also identified as MDH linked oligonucleosides, and methylenecarbonylamino linked oligonucleosides, also identified as amide-3 linked oligonucleosides, and methyleneaminocarbonyl linked oligonucleosides, also identified as amide-4 linked oligonucleosides, as well as mixed backbone compounds having, for instance, alternating MMI and P═O or P═S linkages are prepared as described in U.S. Pat. Nos. 5,378,825; 5,386,023; 5,489,677; 5,602,240; and 5,610,289, all of which are herein incorporated by reference.

[0194] Formacetal and thioformacetal linked oligonucleosides are prepared as described in U.S. Pat. Nos. 5,264,562 and 5,264,564, herein incorporated by reference.

[0195] Ethylene oxide linked oligonucleosides are prepared as described in U.S. Pat. No. 5,223,618, herein incorporated by reference.

### Example 4

### PNA Synthesis

[0196] Peptide nucleic acids (PNAS) are prepared in accordance with any of the various procedures referred to in Peptide Nucleic Acids (PNA): Synthesis, Properties and Potential Applications, Bioorganic & Medicinal Chemistry, 1996, 4, 523. They may also be prepared in accordance with U.S. Pat. Nos. 5,539,082; 5,700,922; and 5,719,262, herein incorporated by reference.

### Example 5

### Synthesis of Chimeric Oligonucleotides

[0197] Chimeric oligonucleotides, oligonucleosides, or mixed oligonucleotides/oligonucleosides of the invention can be of several different types. These include a first type wherein the “gap” segment of linked nucleosides is positioned between 5′ and 3′ “wing” segments of linked nucleosides and a second “open end” type wherein the “gap” segment is located at either the 3′ or the 5′ terminus of the oligomeric compound. Oligonucleotides of the first type are also known in the art as “gapmers” or gapped oligonucleotides. Oligonucleotides of the second type are also known in the art as “hemimers” or “wingmers”.

[0198] [2′-O-Me]--[2′-deoxy]--[2′-O-Me] Chimeric Phosphorothioate Oligonucleotides

[0199] Chimeric oligonucleotides having 2′-O-alkyl phosphorothioate and 2′-deoxy phosphorothioate oligonucleotide segments are synthesized using an Applied Biosystems automated DNA synthesizer Model 380B, as above. Oligonucleotides are synthesized using the automated synthesizer and 2′-deoxy-5′-dimethoxytrityl-3′-O-phosphoramidite for the DNA portion and 5′-dimethoxytrityl-2′-O-methyl-3′-O-phosphoramidite for 5′ and 3′ wings. The standard synthesis cycle is modified by increasing the wait step after the delivery of tetrazole and base to 600 s repeated four times for RNA and twice for 2′-O-methyl. The fully protected oligonucleotide is cleaved from the support and the phosphate group is deprotected in 3:1 ammonia/ethanol at room temperature overnight then lyophilized to dryness. Treatment in methanolic ammonia for 24 hrs at room temperature is then done to deprotect all bases and sample is again lyophilized to dryness. The pellet is resuspended in 1M TBAF in THF for 24 hrs at room temperature to deprotect the 2′ positions. The reaction is then quenched with 1M TEAA and the sample is then reduced to ½ volume by rotovac before being desalted on a G25 size exclusion column. The oligo recovered is then analyzed spectrophotometrically for yield and for purity by capillary electrophoresis and by mass spectrometry.

[0200] [2′-O-(2-Methoxyethyl)]--[2′-deoxy]--[2′-O-(Methoxyethyl)] Chimeric Phosphorothioate Oligonucleotides

[0201] [2′-O-(2-methoxyethyl)]--[2′-deoxy]-[-2′-O-(methoxyethyl)] chimeric phosphorothioate oligonucleotides are prepared as per the procedure above for the 2′-O-methyl chimeric oligonucleotide, with the substitution of phorothioate oligonucleotides are prepared as per the procedure abo 2′-O-(methoxyethyl) amidites for the 2′-O-methyl amidites.

[0202] 2′-O-(2-Methoxyethyl)Phosphodiester]--[2′-deoxy Phosphorothioate]--[2′O-(2-Methoxyethyl)]Phosphodiester] Chimeric Oligonucleotides

[0203] [2′-O-(2-methoxyethyl phosphodiester]--[2′-deoxy phosphorothioate]--[2′-O-(methcixyethyl) phosphodiester] chimeric oligonucleotides are prepared as per the above procedure for the 2′-O-methyl chimeric oligonucleotide with the substitution of 2′-O-(methoxyethyl) amidites for the 2′-O-methyl amidites, oxidization with iodine to generate the phosphodiester internucleotide linkages within the wing portions of the chimeric structures and sulfurization utilizing 3,H-1,2 benzodithiole-3-one 1,1 dioxide (Beaucage Reagent) to generate the phosphorothioate internucleotide linkages for the center gap.

[0204] Other chimeric oligonucleotides, chimeric oligonucleosides, and mixed chimeric oligonucleotides/oligonucleosides are synthesized according to U.S. Pat. No. 5,623,065, herein incorporated by reference.

### Example 6

### Oligonucleotide Isolation

[0205] After cleavage from the controlled pore glass column (Applied Biosystems) and deblocking in concentrated ammonium hydroxide at 55° C. for 18 hours, the oligonucleotides or oligonucleosides are purified by precipitation twice out of 0.5 M NaCl with 2.5 volumes ethanol. Synthesized oligonucleotides are analyzed by polyacrylamide gel electrophoresis on denaturing gels and judged to be at least 85% full-length material. The relative amounts of phosphorothioate and phosphodiester linkages obtained in synthesis are periodically checked by “P nuclear magnetic resonance spectroscopy, and for some studies oligonucleotides are purified by HPLC, as described by Chiang et al., J. Biol. Chem. 1991, 266, 18162-18171.

### Example 7

### Oligonucleotide Synthesis—96 Well Plate Format

[0206] Oligonucleotides are synthesized via solid phase P(III) phosphoramidite chemistry on an automated synthesizer capable of assembling 96 sequences simultaneously in a standard 96 well format. Phosphodiester internucleotide linkages are afforded by oxidation with aqueous iodine. Phosphorothioate internucleotide linkages are generated by sulfurization utilizing 3,H-1,2 benzodithiole-3-one 1,1 dioxide (Beaucage Reagent) in anhydrous acetonitrile. Standard base-protected beta-cyanoethyldiisopropyl phosphoramidites can be purchased from commercial vendors (e.g. PE-Applied Biosystems, Foster City, Calif., or Pharmacia, Piscataway, N.J.). Non-standard nucleosides are synthesized as per known literature or patented methods. They are utilized as base protected betacyanoethyldiisopropyl phosphoramidites.

[0207] Oligonucleotides are cleaved from support and deprotected with concentrated NH₄OH at elevated temperature (55-60° C.) for 12-16 hours and the released product then dried in vacuo. The dried product is then re-suspended in sterile water to afford a master plate from which all analytical and test plate samples are then diluted utilizing robotic pipettors.

### Example 8

### Oligonucleotide Analysis—96 Well Plate Format

[0208] The concentration of oligonucleotide in each well is assessed by dilution of samples and UV absorption spectroscopy. The full-length integrity of the individual products is evaluated by capillary electrophoresis (CE) in either the 96 well format (Beckman P/ACE™ MDQ) or, for individually prepared samples, on a commercial CE apparatus (e.g., Beckman P/ACE™ 5000, ABI 270). Base and backbone composition is confirmed by mass analysis of the compounds utilizing electrospray-mass spectroscopy. All assay test plates are diluted from the master plate using single and multi-channel robotic pipettors. Plates are judged to be acceptable if at least 85% of the compounds on the plate are at least 85% full length.

### Example 9

### Cell Culture and Oligonucleotide Treatment

[0209] The effect of antisense compounds on target nucleic acid expression can be tested in any of a variety of cell types provided that the target nucleic acid is present at measurable levels. This can be routinely determined using, for example, PCR or Northern blot analysis. The following 6 cell types are provided for illustrative purposes, but other cell types can be routinely used, provided that the target is expressed in the cell type chosen. This can be readily determined by methods routine in the art, for example Northern blot analysis, Ribonuclease protection assays, or RT-PCR.

[0210] T-24 Cells:

[0211] The human transitional cell bladder carcinoma cell line T-24 is obtained from the American Type Culture Collection (ATCC) (Manassas, Va.). T-24 cells are routinely cultured in complete McCoy's 5A basal media (Gibco/Life Teclnologies, Gaithersburg, Md.) supplemented with 10% fetal calf serum (Gibco/Life Technologies, Gaithersburg, Md.), penicillin 100 units per mL, and streptomycin 100 micrograms per mL (Gibco/Life Technologies, Gaithersburg, Md.). Cells are routinely passaged by trypsinization and dilution when they reached 90% confluence. Cells are seeded into 96-well plates (Falcon-Primaria #3872) at a density of 7000 cells/well for use in RT-PCR analysis.

[0212] For Northern blotting or other analysis, cells may be seeded onto 100 mm or other standard tissue culture plates and treated similarly, using appropriate volumes of medium and oligonucleotide.

[0213] A549 Cells:

[0214] The human lung carcinoma cell line A549 can be obtained from the American Type Culture Collection (ATCC) (Manassas, Va.). A549 cells are routinely cultured in DMEM basal media (Gibco/Life Technologies, Gaithersburg, Md.) supplemented with 10% fetal calf serum (Gibco/Life Technologies, Gaithersburg, Md.), penicillin 100 units per mL, and streptomycin 100 micrograms per mL (Gibco/Life Technologies, Gaithersburg, Md.). Cells are routinely passaged by trypsinization and dilution when they reached 90% confluence.

[0215] NHDF Cells:

[0216] Human neonatal dermal fibroblast (NHDF) can be obtained from the Clonetics Corporation (Walkersville Md.). NHDFs are routinely maintained in Fibroblast Growth Medium (Clonetics Corporation, Walkersville Md.) supplemented as recommended by the supplier. Cells are maintained for up to 10 passages as recommended by the supplier.

[0217] HEK Cells:

[0218] Human embryonic keratinocytes (HEK) can be obtained from the Clonetics Corporation (Walkersville Md.). HEKs are routinely maintained in Keratinocyte Growth Medium (Clonetics Corporation, Walkersville Md.) formulated as recommended by the supplier. Cells are routinely maintained for up to 10 passages as recommended by the supplier.

[0219] MCF-7 Cells:

[0220] The human breast carcinoma cell line MCF-7 is obtained from the American Type Culture Collection (Manassas, Va.). MCF-7 cells are routinely cultured in DMEM low glucose (Gibco/Life Technologies, Gaithersburg, Md.) supplemented with 10% fetal calf serum (Gibco/Life Technologies, Gaithersburg, Md.). Cells are routinely passaged by trypsinization and dilution when they reached 90% confluence. Cells are seeded into 96-well plates (Falcon-Primaria #3872) at a density of 7000 cells/well for use in RT-PCR analysis.

[0221] For Northern blotting or other analyses, cells may be seeded onto 100 mm or other standard tissue culture plates and treated similarly, using appropriate volumes of medium and oligonucleotide.

[0222] LA4 Cells:

[0223] The mouse lung epithelial cell line LA4 is obtained from the American Type Culture Collection (Manassas, Va.). LA4 cells are routinely cultured in F12K medium (Gibco/Life Technologies, Gaithersburg, Md.) supplemented with 15% fetal calf serum (Gibco/Life Technologies, Gaithersburg, Md.). Cells are routinely passaged by trypsinization and dilution when they reached 90% confluence. Cells are seeded into 96-well plates (Falcon-Primaria #3872) at a density of 3000-6000 cells/well for use in RT-PCR analysis.

[0224] For Northern blotting or other analyses, cells may be seeded onto 100 mm or other standard tissue culture plates and treated similarly, using appropriate volumes of medium and oligonucleotide.

[0225] Treatment with Antisense Compounds:

[0226] When cells reached 80% confluence, they are treated with oligonucleotide. For cells grown in 96-well plates, wells are washed once with 200 μL OPTI-MEM™-1 reduced-serum medium (Gibco BRL) and then treated with 130 μL of OPTI-MEM™-1 containing 3.75 μg/mL LIPOFECTIN™ (Gibco BRL) and the desired concentration of oligonucleotide. After 4-7 hours of treatment, the medium is replaced with fresh medium. Cells are harvested 16-24 hours after oligonucleotide treatment.

[0227] The concentration of oligonucleotide used varies from cell line to ell line. To determine the optimal oligonucleotide concentration for a particular ell line, the cells are treated with a positive control oligonucleotide at a range of concentrations.

### Example 10

### Analysis of Oligonucleotide Inhibition of GFAT Expression

[0228] Antisense modulation of GFAT expression can be assayed in a variety of ways known in the art. For example, GFAT mRNA levels can be quantitated by, e.g., Northern blot analysis, competitive polymerase chain reaction (PCR), or real-time PCR (RT-PCR). Real-time quantitative PCR is presently preferred. RNA analysis can be performed on total cellular RNA or poly(A)+ mRNA. Methods of RNA isolation are taught in, for example, Ausubel, F.M. et al., Current Protocols in Molecular Biology, Volume 1, pp. 4.1.1-4.2.9 and 4.5.1-4.5.3, John Wiley & Sons, Inc., 1993. Northern blot analysis is routine in the art and is taught in, for example, Ausubel, F. M. et al., Current Protocols in Molecular Biology, Volume 1, pp. 4.2.1-4.2.9, John Wiley & Sons, Inc., 1996. Real-time quantitative (PCR) can be conveniently accomplished using the commercially available ABI PRISM™ 7700 Sequence Detection System, available from PE-Applied Biosystems, Foster City, Calif. and used according to manufacturer's instructions. Prior to quantitative PCR analysis, primer-probe sets specific to the target gene being measured are evaluated for their ability to be “multiplexed” with a GAPDH amplification reaction. In multiplexing, both the target gene and the internal standard gene GAPDH are amplified concurrently in a single sample. In this analysis, mRNA isolated from untreated cells is serially diluted. Each dilution is amplified in the presence of primer-probe sets specific for GAPDH only, target gene only (“single-plexing”), or both (multiplexing). Following PCR amplification, standard curves of GAPDH and target mRNA signal as a function of dilution are generated from both the single-plexed and multiplexed samples. If both the slope and correlation coefficient of the GAPDH and target signals generated from the multiplexed samples fall within 10% of their corresponding values generated from the single-plexed samples, the primer-probe set specific for that target is deemed as multiplexable. Other methods of PCR are also known in the art.

[0229] Protein levels of GFAT can be quantitated in a variety of ways well known in the art, such as immunoprecipitation, Western blot analysis (immunoblotting), ELISA or fluorescence-activated cell sorting (FACS). Antibodies directed to GFAT can be identified and obtained from a variety of sources, such as the MSRS catalog of antibodies (Aerie Corporation, Birmingham, Mich.), or can be prepared via conventional antibody generation methods. Methods for preparation of polyclonal antisera are taught in, for example, Ausubel, F. M. et al., Current Protocols in Molecular Biology, Volume 2, pp. 11.12.1-11.12.9, John Wiley & Sons, Inc., 1997. Preparation of monoclonal antibodies is taught in, for example, Ausubel, F. M. et al., Current Protocols in Molecular Biology, Volume 2, pp. 11.4.1-11.11.5, John Wiley Sons, Inc., 1997.

[0230] Immunoprecipitation methods are standard in the art and can be found at, for example, Ausubel, F. M. et al., Current Protocols in Molecular Biology, Volume 2, pp. 10.16.110.16.11, John Wiley & Sons, Inc., 1998. Western blot (immunoblot) analysis is standard in the art and can be found at, for example, Ausubel, F. M. et al., Current Protocols in Molecular Biology, Volume 2, pp. 10.8.1-10.8.21, John Wiley Sons, Inc., 1997. Enzyme-linked immunosorbent assays (ELISA) are standard in the art and can be found at, for example, Ausubel, F. M. et al., Current Protocols in Molecular Biology, Volume 2, pp. 11.2.1-11.2.22, John Wiley & Sons, Inc., 1991.

### Example 11

### Poly(A)+ mRNA Isolation

[0231] Poly(A)+ mRNA is isolated according to Miura et al., Clin. Chem., 1996, 42, 1758-1764. Other methods for poly(A)+ mRNA isolation are taught in, for example, Ausubel, F. M. et al., Current Protocols in Molecular Biology, Volume 1, pp. 4.5.1-4.5.3, John Wiley & Sons, Inc., 1993. Briefly, for cells grown on 96-well plates, growth medium is removed from the cells and each well is washed with 200 μL cold PBS. 60 μL lysis buffer (10 mM Tris-HCl, pH 7.6, 1 mM EDTA, 0.5 M NaCl, 0.5% NP-40, 20 mM vanadyl-ribonucleoside complex) is added to each well, the plate is gently agitated and then incubated at room temperature for five minutes. 55 μL of lysate is transferred to Oligo d(T) coated 96-well plates (AGCT Inc., Irvine Calif.). Plates are incubated for 60 minutes at room temperature, washed 3 times with 200 μL of wash buffer (10 mM Tris-HCl pH 7.6, 1 mM EDTA, 0.3 M NaCl). After the final wash, the plate is blotted on paper towels to remove excess wash buffer and then air-dried for 5 minutes. 60 pL of elution buffer (5 mM Tris-HCl pH 7.6), preheated to 70° C. is added to each well, the plate is incubated on a 90° C. hot plate for 5 minutes, and the eluate is then transferred to a fresh 96-well plate.

[0232] Cells grown on 100 mm or other standard plates may be treated similarly, using appropriate volumes of all solutions.

### Example 12

### Total RNA Isolation

[0233] Total mRNA is isolated using an RNEASY 96™ kit and buffers purchased from Qiagen Inc. (Valencia Calif.) following the manufacturer's recommended procedures. Briefly, for cells grown on 96-well plates, growth medium is removed from the cells and each well is washed with 200 μL cold PBS. 100 μL Buffer RLT is added to each well and the plate vigorously agitated for 20 seconds. 100 μL of 70% ethanol is then added to each well and the contents mixed by pipetting three times up and down. The samples are then transferred to the RNEASY 96™ well plate attached to a QIAVAC™n manifold fitted with a waste collection tray and attached to a vacuum source. Vacuum is applied for 15 seconds. 1 mL of Buffer RW1 is added to each well of the RNEASY 96™ plate and the vacuum again applied for 15 seconds. 1 mL of Buffer RPE is then added to each well of the RNEASY 96™ plate and the vacuum applied for a period of 15 seconds. The Buffer RPE wash is then repeated and the vacuum is applied for an additional 10 minutes. The plate is then removed from the QIAVAC™ manifold and blotted dry on paper towels. The plate is then re-attached to the QIAVAC™ manifold fitted with a collection tube rack containing 1.2 mL collection tubes. RNA is then eluted by pipetting 60 μL water into each well, incubating one minute, and then applying the vacuum for 30 seconds. The elution step is repeated with an additional 60 μL water.

[0234] The repetitive pipetting and elution steps may be automated using a QIAGEN Bio-Robot 9604 (Qiagen, Inc., Valencia Calif.). Essentially, after lysing of the cells on the culture plate, the plate is transferred to the robot deck where the pipetting, DNase treatment and elution steps are carried out.

### Example 13

### Real-Time Quantitative PCR Analysis of GFAT mRNA Levels

[0235] Quantitation of GFAT mRNA levels is determined by real-time quantitative PCR using the ABI PRISM™ 7700 Sequence Detection System (PE-Applied Biosystems, Foster City, Calif.) according to manufacturer's instructions. This is a closed-tube, non-gel-based, fluorescence detection system which allows high-throughput quantitation of polymerase chain reaction (PCR) products in real-time. As opposed to standard PCR, in which amplification products are quantitated after the PCR is completed, products in real-time quantitative PCR are quantitated as they accumulate. This is accomplished by including in the PCR reaction an oligonucleotide probe that anneals specifically between the forward and reverse PCR primers, and contains two fluorescent dyes. A reporter dye (e.g., JOE, FAM™, or VIC, obtained from either Operon Technologies Inc., Alameda, Calif. or PE-Applied Biosystems, Foster City, Calif.) is attached to the 5′ end of the probe and a quencher dye (e.g., TAMRA, obtained from either Operon Technologies Inc., Alameda, Calif. or PE-Applied Biosystems, Foster City, Calif.) is attached to the 3′ end of the probe. When the probe and dyes are intact, reporter dye emission is quenched by the proximity of the 3′ quencher dye. During amplification, annealing of the probe to the target sequence creates a substrate that can be cleaved by the 5′-exonuclease activity of Taq polymerase. During the extension phase of the PCR amplification cycle, cleavage of the probe by Taq polymerase releases the reporter dye from the remainder of the probe (and hence from the quencher moiety) and a sequence-specific fluorescent signal is generated. With each cycle, additional reporter dye molecules are cleaved from their respective probes, and the fluorescence intensity is monitored at regular intervals by laser optics built into the ABI PRISM™ 7700 Sequence Detection System. In each assay, a series of parallel reactions containing serial dilutions of mRNA from untreated control samples generates a standard curve that is used to quantitate the percent inhibition after antisense oligonucleotide treatment of test samples.

[0236] PCR reagents can be obtained from PE-Applied Biosystems, Foster City, Calif. RT-PCR reactions are carried out by adding 25 μL PCR cocktail (1×TAQMAN™ buffer A, 5.5 MM MgCl₂, 300 μM each of dATP, dCTP and dGTP, 600 μM of dUTP, 100 nM each of forward primer, reverse primer, and probe, 20 Units RNAse inhibitor, 1.25 Units AMPLITAQ GOLD™, and 12.5 Units MuLV reverse transcriptase) to 96 well plates containing 25 μL poly(A) mRNA solution. The RT reaction is carried out by incubation for 30 minutes at 48° C. Following a 10 minute incubation at 95° C. to activate the AMPLITAQ GOLD™, 40 cycles of a two-step PCR protocol are carried out: 95° C. for 15 seconds (denaturation) followed by 60° C. for 1.5 minutes (annealing/extension).

[0237] Probes and primers to human GFAT-1 were designed to hybridize to a human GFAT-1 sequence, using published sequence, information (GenBank accession number NM_{—}002056, incorporated herein as FIG. 1). For human GFAT-1 the PCR primers were: forward primer: ATGCAAGAAAGACGCAAAGAGAT SEQ ID NO:3064 reverse primer: TTCGTCATCCATGCTCAGTACTTC SEQ ID NO:3065 and the PCR probe is: FAM™-ATGCTTGGATTGAAACGGCTGCCTG SEQ ID NO:3066-TAMRA where FAM™ (PE-Applied Biosystems, Foster City, Calif.) is the fluorescent reporter dye) and TAMRA (PE-Applied Biosystems, Foster City, Calif.) is the quencher dye. For human cyclophilin the PCR primers were: forward primer: CCCACCGTGTTCTTCGACAT SEQ ID NO:3067 reverse primer: TTTCTGCTGTCTTTGGGACCTT SEQ ID NO:3068 and the PCR probe is: 5′ JOE-CGCGTCTCCTTTGAGCTGTTTGCA SEQ ID NO:3069-TAMRA 3′ where JOE (PE-Applied Biosystems, Foster City, Calif.) is the fluorescent reporter dye) and TAMRA (PE-Applied Biosystems, Foster City, Calif.) is the quencher dye.

### Example 14

### Antisense Inhibition of Human GFAT Expression by Chimeric Phosphorothioate Oligonucleotides Having 2′-MOE Wings and a Deoxy Gap

[0238] In accordance with the present invention, a series of oligonucleotides are designed to target different regions of the human GFAT-1 RNA, using published sequences (GenBank accession number NM_{—}002056, incorporated herein as FIG. 1). The oligonucleotides are shown in Table 1. “Position” indicates the first (5′-most) nucleotide number on the particular target sequence to which the oligonucleotide binds. The indicated parameters for each oligo were predicted using RNAstructure 3.7 by David H. Mathews, Michael Zuker, and Douglas H. Turner. The parameters are described either as free energy (The energy that is released when a reaction occurs. The more negative the number, the more likely the reaction will occur. All free energy units are in kcal/mol.) or melting temperature (the temperature at which two anneal strands of polynucleic acid separate. The higher the temperature, greater the affinity between the 2 strands.) When designing an antisense oligonucleotide (oligomers) that will bind with high affinity, it is desirable to consider the structure of the target RNA strand and the antisense oligomer. Specifically, for an oligomer to bind tightly (in the table described as ‘duplex formation’), it should be complementary to a stretch of target RNA that has little self-structure (in the table the free energy of which is described as ‘target structure’). Also, the oligomer should have little self-structure, either intramolecular (in the table the free energy of which is described as ‘intramolecular oligo’) or bimolecular (in the table the free energy of which is described as ‘intermolecular oligo’). Breaking up any self-structure amounts to a binding penalty. All compounds in Table 1 are chimeric oligonucleotides (“gapmers”) 20 nucleotides in length, composed of a central “gap” region consisting of ten 2′deoxynucleotides, which is flanked on both sides (5′ and 3′directions) by four-nucleotide “wings”. The wings are composed of 2′-methoxyethyl (2′-MOE) nucleotides. The internucleoside (backbone) linkages are phosphorothioate (P═S) throughout the oligonucleotide. Cytidine residues in the 2′-MOE wings are 5-methylcytidines. All cytidine residues are 5-methylcytidines.

TABLE 1

| | | | | | | | |
|---|---|---|---|---|---|---|---|
| | | | | | | Intra- | Inter- |
| | | total | duplex | Tm of | target | molecular | Molecular |
| postion | oligo | binging | formation | Duplex | structure | oligo | oligo |

| | | | | | | | | |
|---|---|---|---|---|---|---|---|---|
| 1986 | ATGGTCTCAGTATCCTCCTT | SEQ ID NO:1 | −24.4 | −26.4 | 78.1 | −2 | 0 | −3.2 |
| 12 | GGGGGCCGGGGTGGCGCCGA | SEQ ID NO:2 | −24.3 | −37.2 | 90.5 | −11 | −0.2 | −12 |
| 1984 | GGTCTCAGTATCCTCCTTAT | SEQ ID NO:3 | −24.1 | −26.1 | 77.7 | −2 | 0 | −2.5 |
| 1985 | TGGTCTCAGTATCCTCCTTA | SEQ ID NO:4 | −24.1 | −26.1 | 77.6 | −2 | 0 | −3.2 |
| 15 | CTCGGGGGCCGGGGTGGCGC | SEQ ID NO:5 | −23.8 | −35.9 | 89.9 | −11 | 3.5 | −10.2 |
| 1987 | AATGGTCTCAGTATCCTCCT | SEQ ID NO:6 | −23.6 | −25.6 | 75 | −2 | 0 | −3.2 |
| 445 | TTTATCAGAGCGCTGGGGGT | SEQ ID NO:7 | −23.4 | −26.9 | 76.6 | −2.5 | −0.6 | −9.4 |
| 14 | TCGGGGGCCGGGGTGGCGCC | SEQ ID NO:8 | −23.3 | −37 | 91.1 | −11 | 0.9 | −13.6 |
| 2246 | GGCTTCAAGGGGTGATATTT | SEQ ID NO:9 | −23.1 | −23.7 | 69.9 | 1 | −0.3 | −7.6 |
| 2247 | AGGCTTCAAGGGGTGATATT | SEQ ID NO:10 | −23.1 | −23.6 | 69.8 | 1 | 0 | −7.6 |
| 2203 | AGGTGTCTTGTGTTGCTTAA | SEQ ID NO:11 | −22.7 | −23.3 | 71.3 | −0.3 | 0 | −3.6 |
| 2204 | AAGGTGTCTTGTGTTGCTTA | SEQ ID NO:12 | −22.7 | −23.3 | 71.3 | −0.3 | 0 | −3.6 |
| 17 | GGCTCGGGGGCCGGGGTGGC | SEQ ID NO:13 | −22.5 | −36.3 | 93.3 | −11 | −2.8 | −9.2 |
| 1988 | TAATGGTCTCAGTATCCTCC | SEQ ID NO:14 | −22.4 | −24.4 | 72.4 | −2 | 0 | −3.2 |
| 2248 | AAGGCTTCAAGGGGTGATAT | SEQ ID NO:15 | −22.2 | −22.8 | 67.1 | 1 | −0.3 | −7.6 |
| 11 | GGGGCCGGGGTGGCGCCGAC | SEQ ID NO:16 | −22.1 | −36.2 | 88.8 | −12.2 | 0.6 | −12 |
| 88 | GCCCGCGAGGCCAGGGGCGA | SEQ ID NO:17 | −22.1 | −36.3 | 88 | −10.8 | −3.4 | −13.4 |
| 446 | TTTTATCAGAGCGCTGGGGG | SEQ ID NO:18 | −22 | −25.8 | 73.5 | −2.5 | −1.2 | −9.4 |
| 2202 | GGTGTCTTGTGTTGCTTAAT | SEQ ID NO:19 | −22 | −23.3 | 70.9 | −1.2 | 0 | −3.6 |
| 2245 | GCTTCAAGGGGTGATATTTT | SEQ ID NO:20 | −22 | −22.6 | 67.6 | 1 | −0.3 | −4.3 |
| 1784 | CTTTGATTTTCAGTGCCCCT | SEQ ID NO:21 | −21.7 | −27 | 76 | −5.3 | 0 | −3.8 |
| 2205 | AAAGGTGTCTTGTGTTGCTT | SEQ ID NO:22 | −21.6 | −22.9 | 69.4 | −0.3 | −0.4 | −4.3 |
| 16 | GCTCGGGGGCCGGGGTGGCG | SEQ ID NO:23 | −21.5 | −35.9 | 89.9 | −11 | −3.4 | −9.2 |
| 2249 | AAAGGCTTCAAGGGGTGATA | SEQ ID NO:24 | −21.5 | −22.1 | 64.9 | 1 | −0.3 | −7.6 |
| 87 | CCCGCGAGGCCAGGGGCGAG | SEQ ID NO:25 | −21.2 | −34.5 | 84.4 | −10.8 | −2.5 | −11.2 |
| 444 | TTATCAGAGCGCTGGGGGTG | SEQ ID NO:26 | −21.2 | −26.8 | 76 | −4.3 | −1.2 | −9.4 |
| 1973 | GTCTCAGTATCCTCCTTATC | SEQ ID NO:27 | −21.2 | −25.3 | 76.8 | −4.1 | 0 | −1.4 |
| 2250 | AAAAGGCTTCAAGGGGTGAT | SEQ ID NO:28 | −21.1 | −21.7 | 63.4 | 1 | −0.3 | −7.6 |
| 20 | GCGGGCTCGGGGGCCGGGGT | SEQ ID NO:29 | −21 | −37.1 | 92.5 | −12.5 | −3.6 | −9.5 |
| 1990 | CTTAATGGTCTCAGTATCCT | SEQ ID NO:30 | −21 | −23 | 69.3 | −2 | 0 | −4 |
| 1137 | TTGACTCTTCCTCTCATTGT | SEQ ID NO:31 | −20.8 | −24.2 | 72.9 | −3.4 | 0 | −2.6 |
| 1138 | GTTGACTCTTCCTCTCATTG | SEQ ID NO:32 | −20.8 | −24.2 | 72.9 | −3.4 | 0 | −2.6 |
| 1139 | AGTTGACTCTTCCTCTCATT | SEQ ID NO:33 | −20.8 | −24.2 | 73.4 | −3.4 | 0 | −3.8 |
| 2206 | AAAAGGTGTCTTGTGTGCT | SEQ ID NO:34 | −20.8 | −22.1 | 66.6 | −0.3 | −0.4 | −4.3 |
| 1136 | TGACTCTTCCTCTCATTGTG | SEQ ID NO:35 | −20.7 | −24.1 | 72.3 | −3.4 | 0 | −2.4 |
| 1312 | GTCACTTGCTAGTTCCACCA | SEQ ID NO:36 | −20.6 | −27.2 | 78.3 | −6.6 | 0 | −1.7 |
| 90 | CGGCCCGCGAGGCCAGGGGC | SEQ ID NO:37 | −20.5 | −36.9 | 89.1 | −11.5 | −4.7 | −17.4 |
| 1989 | TTAATGGTCTCAGTATCCTC | SEQ ID NO:38 | −20.5 | −22.5 | 68.9 | −2 | 0 | −4 |
| 1991 | TCTTAATGGTCTCAGTATCC | SEQ ID NO:39 | −20.5 | −22.5 | 68.9 | −2 | 0 | −2.6 |
| 2207 | CAAAAGGTGTCTTGTGTTGC | SEQ ID NO:40 | −20.5 | −21.9 | 65.8 | −0.3 | −0.6 | −3.8 |
| 86 | CCGCGAGGCCAGGGGCGAGT | SEQ ID NO:41 | −20.4 | −33.7 | 84.6 | −10.8 | −2.5 | −11.2 |
| 1051 | GATCTGCTGGAGTTCCATCT | SEQ ID NO:42 | −20.4 | −26.1 | 76.7 | −5.1 | −0.3 | −6.3 |
| 1781 | TGATTTTCAGTGCCCCTTCA | SEQ ID NO:43 | −20.4 | −27.1 | 76.5 | −6.7 | 0 | −3.8 |
| 13 | CGGGGGCCGGGGTGGCGCCG | SEQ ID NO:44 | −20.3 | −37.4 | 88.6 | −14.2 | −0.2 | −14 |
| 322 | AACTTCTTCATCCAGTGCCT | SEQ ID NO:45 | −20.3 | −26 | 74.7 | −5.7 | 0 | −3.6 |
| 438 | GAGCGCTGGGGGTGGCTATT | SEQ ID NO:46 | −20.1 | −29.6 | 81.9 | −8.5 | −0.8 | −9.4 |
| 1140 | AAGTTGACTCTTCCTCTCAT | SEQ ID NO:47 | −20 | −23.4 | 70.4 | −3.4 | 0 | −4.5 |
| 2869 | TCAGTTGTCCAAAGCAGCTT | SEQ ID NO:48 | −20 | −24.6 | 71.9 | −3.9 | −0.4 | −8.1 |
| 18 | GGGCTCGGGGGCCGGGGTGG | SEQ ID NO:49 | −19.9 | −35.7 | 91.4 | −12.2 | −3.6 | −9.2 |
| 447 | TTTTTATCAGAGCGCTGGGG | SEQ ID NO:50 | −19.9 | −24.7 | 71.3 | −3.5 | −1.2 | −9.4 |
| 1313 | AGTCACTTGCTAGTTCCACC | SEQ ID NO:51 | −19.9 | −26.5 | 77.5 | −6.6 | 0 | −1.7 |
| 1782 | TTGATTTTCAGTGCCCCTTC | SEQ ID NO:52 | −19.9 | −26.5 | 75.8 | −6.6 | 0 | 3.8 |
| 21 | TGCGGGCTCGGGGGCCGGGG | SEQ ID NO:53 | −19.8 | −35.9 | 88.9 | −12.5 | −3.6 | −11.8 |
| 437 | AGCGCTGGGGGTGGCTATTG | SEQ ID NO:54 | −19.8 | −29 | 80.3 | −8.5 | −0.3 | −8.7 |
| 854 | CCACCGGGAAAAGGCAGGTT | SEQ ID NO:55 | −19.8 | −26.8 | 71 | −6.5 | −0.1 | −7.1 |
| 321 | ACTTCTTCATCCAGTGCCTT | SEQ ID NO:56 | −19.7 | −26.8 | 77.7 | −7.1 | 0 | −3.6 |
| 855 | TCCACCGGGAAAAGGCAGGT | SEQ ID NO:57 | −19.7 | −27.1 | 72.1 | −6.5 | −0.8 | −7.1 |
| 485 | TGGTGATGATTCCATTGTGA | SEQ ID NO:58 | −19.6 | −22.7 | 67.2 | −2.5 | −0.3 | −3.9 |
| 1586 | CATCACACATCATAAGGGCA | SEQ ID NO:59 | −19.6 | −22.6 | 65.7 | −3 | 0 | −4 |
| 1592 | TCCGATCATCACACATCATA | SEQ ID NO:60 | −19.6 | −22.6 | 65.5 | −3 | 0 | −4.9 |
| 2868 | CAGTTGTCCAAAGCAGCTTG | SEQ ID NO:61 | −19.6 | −24.2 | 70.1 | −3.9 | −0.4 | −8.4 |
| 323 | GAACTTCTTCATCCAGTGCC | SEQ ID NO:62 | −19.5 | −25.7 | 74.1 | −5.7 | −0.2 | −4 |
| 1052 | TGATCTGCTGGAGTTCCATC | SEQ ID NO:63 | −19.5 | −25.2 | 74.4 | −5.1 | −0.3 | −6.3 |
| 2867 | AGTTGTCCAAAGCAGCTTGA | SEQ ID NO:64 | −19.5 | −24.1 | 70.3 | −3.9 | −0.3 | −8.4 |
| 439 | AGAGCGCTGGGGGTGGCTAT | SEQ ID NO:65 | −19.4 | −29.5 | 81.8 | −9.1 | −0.8 | −9.4 |
| 1310 | CACTTGCTAGTTCCACCATC | SEQ ID NO:66 | −19.4 | −26 | 74.6 | −6.6 | 0 | −1.7 |
| 1311 | TCACTTGCTAGTTCCACCAT | SEQ ID NO:67 | −19.4 | −26 | 74.6 | −6.6 | 0 | −1.7 |
| 1141 | AAAGTTGACTCTTCCTCTCA | SEQ ID NO:68 | −19.3 | −22.7 | 68 | −3.4 | 0 | −4.5 |
| 1142 | CAAAGTTGACTCTTCCTCTC | SEQ ID NO:69 | −19.3 | −22.7 | 68 | −3.4 | 0 | −4.5 |
| 1143 | TCAAAGTTGACTCTTCCTCT | SEQ ID NO:70 | −19.3 | −22.7 | 68 | −3.4 | 0 | −5.1 |
| 1587 | TCATCACACATCATAAGGGC | SEQ ID NO:71 | −19.3 | −22.3 | 66.1 | −3 | 0 | −2.9 |
| 1982 | TCTCAGTATCCTCCTTATCA | SEQ ID NO:72 | −19.2 | −24.8 | 74.2 | −5.6 | 0 | −1.6 |
| 487 | GTTGGTGATGATTCCATTGT | SEQ ID NO:73 | −19.1 | −23.4 | 69.7 | −3.6 | −0.5 | −4.9 |
| 443 | TATCAGAGCGCTGGGGGTGG | SEQ ID NO:74 | −19 | −27.9 | 78.3 | −7.6 | −1.2 | −9.4 |
| 1047 | TGCTGGAGTTCCATCTGGAG | SEQ ID NO:75 | −19 | −26 | 75.7 | −6.4 | −0.3 | −6.9 |
| 1129 | TCCTCTCATTGTGTTCACGA | SEQ ID NO:76 | −18.9 | −25 | 73 | −6.1 | 0 | −6.4 |
| 2201 | GTGTCTTGTGTTGCTTAATC | SEQ ID NO:77 | −18.9 | −22.5 | 69.8 | −3.6 | 0 | −3.6 |
| 2252 | AAAAAAGGCTTCAAGGGGTG | SEQ ID NO:78 | −18.9 | −19.7 | 58.3 | −0.6 | 0 | −4.6 |
| 2866 | GTTGTCCAAAGCAGCTTGAA | SEQ ID NO:79 | −18.9 | −23.4 | 67.7 | −3.9 | 0 | −8.4 |
| 9 | GGCCGGGGTGGCGCCGACAC | SEQ ID NO:80 | −18.8 | −34.7 | 85.6 | −12.5 | −3.4 | −12.1 |
| 1064 | AGTTGCCCTTCATGATCTGC | SEQ ID NO:81 | −18.8 | −26.9 | 77.2 | −8.1 | 0 | −6.4 |
| 1780 | GATTTTCAGTGCCCCTTCAA | SEQ ID NO:82 | −18.8 | −26.4 | 74.2 | −7.6 | 0 | −3.8 |
| 1783 | TTTGATTTTCAGTGCCCCTT | SEQ ID NO:83 | −18.7 | −26.2 | 74.5 | −7.5 | 0 | −3.8 |
| 320 | CTTCTTCATCCAGTGCCTTA | SEQ ID NO:84 | −18.6 | −26.3 | 76.5 | −7.7 | 0 | −3.6 |
| 1992 | TTCTTAATGGTCTCAGTATC | SEQ ID NO:85 | −18.6 | −20.6 | 65.2 | −2 | 0 | −2.6 |
| 2253 | AAAAAAAGGCTTCAAGGGGT | SEQ ID NO:86 | −18.6 | −19 | 56.6 | 1.6 | 0 | −3.7 |
| 10 | GGGCCGGGGTGGCGCCGACA | SEQ ID NO:87 | −18.5 | −35.7 | 87.4 | −13.8 | −3.4 | −12.1 |
| 488 | AGTTGGTGATGATTCCATTG | SEQ ID NO:88 | −18.5 | −22.2 | 66.6 | −3 | −0.5 | −4.9 |
| 1131 | CTTCCTCTCATTGTGTTCAC | SEQ ID NO:89 | −18.5 | −24.6 | 74.2 | −6.1 | 0 | −4.9 |
| 1591 | CCGATCATCACACATCATAA | SEQ ID NO:90 | −18.5 | −21.5 | 62.1 | −3 | 0 | −4.9 |
| 1593 | ATCCGATCATCACACATCAT | SEQ ID NO:91 | −18.5 | −22.9 | 66 | −4.4 | 0 | −4.9 |
| 85 | CGCGAGGCCAGGGGCGAGTG | SEQ ID NO:92 | −18.4 | −31.7 | 81.3 | −10.8 | −2.5 | −10.4 |
| 1130 | TTCCTCTCATTGTGTTCACG | SEQ ID NO:93 | −18.4 | −24.5 | 72 | −6.1 | 0 | −6.3 |
| 1788 | ATTTCTTTGATTTTCAGTGC | SEQ ID NO:94 | −18.4 | −20.7 | 64.9 | −2.3 | 0 | −3.8 |
| 404 | CTCCATGTGTTGCCCAACGG | SEQ ID NO:95 | −18.3 | −28.5 | 75.7 | −9.3 | −0.8 | −7.7 |
| 1133 | CTCTTCCTCTCATTGTGTTC | SEQ ID NO:96 | −18.3 | −25 | 76.4 | −6.7 | 0 | −2.4 |
| 1134 | ACTCTTCCTCTCATTGTGTT | SEQ ID NO:97 | −18.3 | −24.8 | 75.2 | −6.5 | 0 | −2.4 |
| 1309 | ACTTGCTAGTTCCACCATCA | SEQ ID NO:98 | −18.3 | −26 | 74.6 | −7.7 | 0 | −1.4 |
| 1319 | CCAGGAAGTCACTTGCTAGT | SEQ ID NO:99 | −18.3 | −24.9 | 72.7 | −6.6 | 0 | −1.4 |
| 91 | ACGGCCCGCGAGGCCAGGGG | SEQ ID NO:100 | −18.2 | −35.3 | 85.7 | −12.2 | 4.7 | −17.4 |
| 409 | GGGTTCTCCATGTGTTGCCC | SEQ ID NO:101 | −18.2 | −30.4 | 85.3 | −10.9 | −1.2 | −4.8 |
| 489 | TAGTTGGTGATGATTCCATT | SEQ ID NO:102 | −18.2 | −21.9 | 66.1 | −3 | −0.5 | −4.1 |
| 547 | GTCTGTTTCAGATTCGAAGT | SEQ ID NO:103 | −18.2 | −22 | 67.2 | −2.2 | −1.4 | −10.4 |
| 1060 | GCCCTTCATGATCTGCTGGA | SEQ ID NO:104 | −18.2 | −28.3 | 78.9 | −10.1 | 0 | −6.1 |
| 1145 | CATCAAAGTTGACTCTTCCT | SEQ ID NO:105 | −18.2 | −22.1 | 65.7 | −3.4 | −0.1 | −6 |
| 1585 | ATCACACATCATAAGGGCAA | SEQ ID NO:106 | −18.2 | −21.2 | 62.5 | −3 | 0 | −4 |
| 2871 | TGTCAGTTGTCCAAAGCAGC | SEQ ID NO:107 | −18.2 | −24.8 | 72.8 | −6.6 | 0 | −4.1 |
| 158 | TTTCTCGTCTCGTTCGAGGA | SEQ ID NO:108 | −18.1 | −25.3 | 73 | −4.7 | −2.5 | −9.1 |
| 1132 | TCTTCCTCTCATTGTGTTCA | SEQ ID NO:109 | −18.1 | −24.8 | 75.4 | −6.7 | 0 | −3.4 |
| 1315 | GAAGTCACTTGCTAGTTCA | SEQ ID NO:110 | −18.1 | −24.2 | 71.8 | −6.1 | 0 | −1.7 |
| 1316 | GGAAGTCACTTGCTAGTTCC | SEQ ID NO:111 | −18.1 | −24.7 | 73.4 | −6.6 | 0 | −1.8 |
| 2514 | CTGGTCTGAATGAAGTATGG | SEQ ID NO:112 | −18.1 | −20.5 | 62.1 | −2.4 | 0 | −3 |
| 2872 | TTGTCAGTTGTCCAAAGCAG | SEQ ID NO:113 | −18.1 | −23.1 | 68.7 | −5 | 0 | −4.1 |
| 2873 | ATTGTCAGTTGTCCAAAGCA | SEQ ID NO:115 | −18.1 | −23.1 | 68.4 | −5 | 0 | −4.1 |
| 436 | GCGCTGGGGGTGGCTATTGA | SEQ ID NO:115 | −18 | −29.6 | 81.3 | −11.1 | −0.2 | −7.2 |
| 19 | CGGGCTCGGGGGCCGGGGTG | SEQ ID NO:116 | −17.9 | −35.3 | 88.2 | −13.8 | −3.6 | −9.2 |
| 34 | TCGGTGGGCAATCTGCGGGC | SEQ ID NO:117 | −17.9 | −29.9 | 80 | −9.8 | −2.2 | −7 |
| 546 | TCTGTTTCAGATTCGAAGTC | SEQ ID NO:118 | −17.9 | −21.2 | 65.3 | −2.2 | −0.9 | −9.3 |
| 1144 | ATCAAAGTTGACTCTTCCTC | SEQ ID NO:119 | −17.9 | −21.8 | 66 | −3.4 | −0.1 | −6 |
| 2863 | GTCCAAAGCAGCTTGAATTT | SEQ ID NO:120 | −17.9 | −22.3 | 65 | −3.9 | 0 | −7.9 |
| 160 | GATTTCTCGTCTCGTTCGAG | SEQ ID NO:121 | −17.8 | −24.1 | 70.3 | −4.7 | −1.5 | −8.5 |
| 161 | GGATTTCTCGTCTCGTTCGA | SEQ ID NO:122 | −17.8 | −25.3 | 72.7 | −6.8 | −0.4 | −5.2 |
| 484 | GGTGATGATTCCATTGTGAA | SEQ ID NO:123 | −17.8 | −22 | 65.1 | −3.5 | −0.5 | −4 |
| 534 | TCGAAGTCATAGCCTTTGCT | SEQ ID NO:124 | −17.8 | −24.7 | 71 | −5.7 | −1.1 | −6.4 |
| 406 | TTCTCCATGTGTTGCCCAAC | SEQ ID NO:125 | −17.7 | −27 | 75.5 | −9.3 | 0 | −6.3 |
| 442 | ATCAGAGCGCTGGGGGTGGC | SEQ ID NO:126 | −17.7 | −30 | 83.4 | −11 | −1.2 | −8.8 |
| 856 | TTCCACCGGGAAAAGGCAGG | SEQ ID NO:127 | −17.7 | −26 | 69.5 | −6.5 | −1.8 | −7.6 |
| 1044 | TGGAGTTCCATCTGGAGTGT | SEQ ID NO:128 | −17.7 | −25.7 | 76.4 | −7.5 | −0.2 | −6.9 |
| 1146 | TCATCAAAGTTGACTCTTCC | SEQ ID NO:129 | −17.7 | −21.6 | 65.2 | −3.4 | −0.1 | −6 |
| 1314 | AAGTCACTTGCTAGTTCCAC | SEQ ID NO:130 | −17.7 | −23.8 | 71.1 | −6.1 | 0 | −1.5 |
| 1533 | GCCTTTGTACTGGCCACACC | SEQ ID NO:131 | −17.7 | −29.7 | 80.7 | −10.8 | −1.1 | −8.4 |
| 2864 | TGTCCAAAGCAGCTTGAATT | SEQ ID NO:132 | −17.7 | −22.2 | 64.6 | −3.9 | 0 | −8.4 |
| 2865 | TTGTCCAAAGCAGCTTGAAT | SEQ ID NO:133 | −17.7 | −22.2 | 64.6 | −3.9 | 0 | −8.4 |
| 448 | ATTTTTATCAGAGCGCTGGG | SEQ ID NO:134 | −17.6 | −23.5 | 68.7 | −4.6 | −1.2 | −9.4 |
| 535 | TTCGAAGTCATAGCCTTTGC | SEQ ID NO:135 | −17.6 | −23.9 | 69.4 | −5.7 | −0.3 | −6.8 |
| 858 | TCTTCCACCGGGAAAAGGCA | SEQ ID NO:136 | −17.6 | −26.1 | 70.1 | −6.5 | −2 | −7.9 |
| 1061 | TGCCCTTCATGATCTGCTGG | SEQ ID NO:137 | −17.6 | −27.7 | 77.4 | −10.1 | 0 | −6.8 |
| 89 | GGCCCGCGAGGCCAGGGGCG | SEQ ID NO:138 | −17.5 | −36.9 | 89.1 | −14.7 | −4.2 | −17.2 |
| 159 | ATTTCTCGTCTCGTTCGAGG | SEQ ID NO:139 | −17.5 | −24.7 | 71.6 | −4.7 | −2.5 | −9.1 |
| 385 | GGTATGAGCTATTCCAAGGT | SEQ ID NO:140 | −17.5 | −24 | 70.7 | −6.5 | 0 | −5.1 |
| 405 | TCTCCATGTGTTGCCCAACG | SEQ ID NO:141 | −17.5 | −27.7 | 74.9 | −9.3 | −0.8 | −7.7 |
| 723 | AGAGGGCTACCTCGCCTTGT | SEQ ID NO:142 | −17.5 | −29.7 | 81.6 | −8.3 | −3.9 | −9.6 |
| 866 | CTGCTTTTTCTTCCACCGGG | SEQ ID NO:143 | −17.5 | −27.9 | 76.8 | −10.4 | 0 | −7.1 |
| 1584 | TCACACATCATAAGGGCAAA | SEQ ID NO:144 | −17.5 | −20.5 | 60.5 | −3 | 0 | −4 |
| 1588 | ATCATCACACATCATAAGGG | SEQ ID NO:145 | −17.5 | −20.5 | 61.9 | −3 | 0 | −1.7 |
| 1790 | TAATTTCTTTGATTTTCAGT | SEQ ID NO:146 | −17.5 | −17.9 | 57.8 | 0.2 | 0 | −2.8 |
| 1791 | GTAATTTCTTTGATTTTCAG | SEQ ID NO:147 | −17.5 | −17.9 | 57.8 | 0.6 | 0 | −2.8 |
| 1792 | AGTAATTTCTTTGATTTTCA | SEQ ID NO:148 | −17.5 | −17.9 | 57.8 | 0.6 | 0 | −2.7 |
| 329 | GCTTGTGAACTTCTTCATCC | SEQ ID NO:149 | −17.4 | −24 | 71.1 | −5.7 | −0.8 | −5.2 |
| 1786 | TTCTTTGATTTTCAGTGCCC | SEQ ID NO:150 | −17.4 | −24.6 | 72.5 | −7.2 | 0 | −3.8 |
| 2251 | AAAAAGGCTTCAAGGGGTGA | SEQ ID NO:151 | −17.4 | −21 | 61.4 | −3.1 | −0.1 | −7.6 |
| 157 | TTCTCGTCTCGTTCGAGGAA | SEQ ID NO:152 | −17.3 | −24.5 | 70.2 | −4.7 | 2.5 | −9.1 |
| 490 | GTAGTTGGTGATGATTCCAT | SEQ ID NO:153 | −17.3 | −23 | 69.1 | −5.1 | −0.3 | −3.9 |
| 533 | CGAAGTCATAGCCTTTGCTT | SEQ ID NO:154 | −17.3 | −24.4 | 69.8 | −5.7 | −1.3 | −5.9 |
| 1043 | GGAGTTCCATCTGGAGTGTT | SEQ ID NO:155 | −17.3 | −25.8 | 77 | −8.5 | 0.1 | −6.6 |
| 1993 | GTTCTTAATGGTCTCAGTAT | SEQ ID NO:156 | −17.3 | −21.4 | 67.1 | −4.1 | 0 | −2.6 |
| 2192 | GTTGCTTAATCATACAGTTT | SEQ ID NO:157 | −17.3 | −20.2 | 62.7 | −2.9 | 0 | −3.6 |
| 326 | TGTGAACTTCTTCATCCAGT | SEQ ID NO:158 | −17.2 | −23.1 | 69.2 | −4.5 | −1.3 | −4.2 |
| 857 | CTTCCACCGGGAAAAGGCAG | SEQ ID NO:159 | −17.2 | −25.7 | 68.9 | −6.5 | −2 | −7.9 |
| 1135 | GACTCTTCCTCTCATTGTGT | SEQ ID NO:160 | −17.2 | −25.3 | 76.2 | −8.1 | 0 | −2.5 |
| 1527 | GTACTGGCCACACCAATCTC | SEQ ID NO:161 | −17.2 | −26.5 | 74.3 | −8 | −1.2 | −8.4 |
| 1594 | GATCCGATCATCACACATCA | SEQ ID NO:162 | −17.2 | −23.5 | 67.3 | −6.3 | 0 | −6.8 |
| 2590 | CCTTCCCTAACTGTCCAAGT | SEQ ID NO:163 | −17.2 | −27.2 | 74.8 | −9.4 | −0.3 | −3.2 |
| 1063 | GTTGCCCTTCATGATCTGCT | SEQ ID NO:164 | −17.1 | −27.8 | 78.9 | −10.7 | 0 | −6.8 |
| 1128 | CCTCTCATTGTGTTCACGAC | SEQ ID NO:165 | −17.1 | −24.8 | 71.9 | −7.7 | 0 | −6.4 |
| 1785 | TCTTTGATTTTCAGTGCCCC | SEQ ID NO:166 | −17.1 | −26.5 | 75.8 | −9.4 | 0 | −3.8 |
| 2254 | TAAAAAAAGGCTTCAAGGGG | SEQ ID NO:167 | −17.1 | −17.5 | 53.5 | 2.3 | 0 | −3.7 |
| 324 | TGAACTTCTTCATCCAGTGC | SEQ ID NO:168 | −17 | −23.7 | 70.2 | −5.7 | −0.9 | −5.3 |
| 386 | GGGTATGAGCTATTCCAAGG | SEQ ID NO:169 | −17 | −24 | 69.9 | −6.5 | −0.1 | −5.1 |
| 403 | TCCATGTGTTGCCCAACGGG | SEQ ID NO:170 | −17 | −28.8 | 76.3 | −10.8 | −0.9 | −7.7 |
| 530 | AGTCATAGCCTTTGCTTTCC | SEQ ID NO:171 | −17 | −26.2 | 76.8 | −7.8 | −1.3 | −4.5 |
| 859 | TTCTTCCACCGGGAAAAGGC | SEQ ID NO:172 | −17 | −25.5 | 69.4 | −6.5 | −2 | −7.1 |
| 1528 | TGTACTGGCCACACCAATCT | SEQ ID NO:173 | −17 | −26.1 | 72.5 | −8 | −1 | −8.2 |
| 1787 | TTTCTTTGATTTTCAGTGCC | SEQ ID NO:174 | −16.9 | −22.7 | 69 | −5.8 | 0 | −2.8 |
| 2239 | AGGGGTGATATTTTAAATCA | SEQ ID NO:175 | −16.9 | −18.8 | 58.3 | −1.4 | −0.1 | −4.7 |
| 2562 | ACACTGCCACTGGCTTTAGA | SEQ ID NO:176 | −16.9 | −26 | 73.8 | −7.6 | −1.4 | −9 |
| 2854 | AGCTTGAATTTAAAGTTTGT | SEQ ID NO:177 | −16.9 | −17.8 | 56.4 | −0.7 | 0 | −4.9 |
| 22 | CTGCGGGCTCGGGGGCCGGG | SEQ ID NO:178 | −16.8 | −35.6 | 88.3 | −16 | −2.8 | −11.8 |
| 1040 | GTTCCATCTGGAGTGTTTGC | SEQ ID NO:179 | −16.8 | −25.9 | 77.3 | −8.6 | −0.2 | −6.9 |
| 1048 | CTGCTGGAGTTCCATCTGGA | SEQ ID NO:180 | −16.8 | −26.9 | 77.4 | −9.5 | −0.3 | −6.5 |
| 2243 | TTCAAGGGGTGATATTTTAA | SEQ ID NO:181 | −16.8 | −18.9 | 58.7 | −1.4 | −0.3 | −3.1 |
| 2255 | CTAAAAAAAGGCTTCAAGGG | SEQ ID NO:182 | −16.8 | −17.2 | 53 | 2.3 | 0 | −3.7 |
| 33 | CGGTGGGCAATCTGCGGGCT | SEQ ID NO:183 | −16.7 | −30.4 | 80.1 | −11.5 | −2.2 | −5.9 |
| 1641 | AGCCGTTTCAATCCAAGAT | SEQ ID NO:184 | −16.7 | −25.3 | 70.1 | −8.1 | −0.2 | −4.1 |
| 532 | GAAGTCATAGCCTTTGCTTT | SEQ ID NO:185 | −16.6 | −23.7 | 70.1 | −5.7 | −1.3 | −5.9 |
| 1053 | ATGATCTGCTGGAGTTCCAT | SEQ ID NO:186 | −16.6 | −24.8 | 72.6 | −7.6 | −0.3 | −6.3 |
| 1532 | CCTTTGTACTGGCCACACCA | SEQ ID NO:187 | −16.6 | −28.6 | 77.5 | −10.8 | −1.1 | −8.4 |
| 2242 | TCAAGGGGTGATATTTTAAA | SEQ ID NO:188 | −16.6 | −18.1 | 56.4 | −1.4 | 0 | −4.2 |
| 396 | GTTGCCCAACGGGTATGAGC | SEQ ID NO:189 | −16.5 | −27.8 | 75.6 | −10 | −1.2 | −7.1 |
| 408 | GGTTCTCCATGTGTTGCCCA | SEQ ID NO:190 | −16.5 | −29.9 | 83.6 | −12.7 | −0.4 | −4.3 |
| 867 | ACTGCTTTTTCTTCCACCGG | SEQ ID NO:191 | −16.5 | −26.9 | 74.8 | −10.4 | 0 | −6.6 |
| 1050 | ATCTGCTGGAGTTCCATCTG | SEQ ID NO:192 | −16.5 | −25.5 | 75.1 | −8.4 | −0.3 | −6.3 |
| 2191 | TTGCTTAATCATACAGTTTC | SEQ ID NO:193 | −16.5 | −19.4 | 60.9 | −2.9 | 0 | −3.6 |
| 2513 | TGGTCTGAATGAAGTATGGT | SEQ ID NO:194 | −16.5 | −20.8 | 63.3 | −4.3 | 0 | −3 |
| 2589 | CTTCCCTAACTGTCCAAGTA | SEQ ID NO:195 | −16.5 | −24.9 | 70.7 | −7.7 | −0.5 | −3.2 |
| 93 | ACACGGCCCGCGAGGCCAGG | SEQ ID NO:196 | −16.4 | −33.8 | 82.7 | −12.5 | −4.7 | −17.4 |
| 441 | TCAGAGCGCTGGGGGTGGCT | SEQ ID NO:197 | −16.4 | −30.9 | 85.4 | −13.2 | −1.2 | −9.4 |
| 531 | AAGTCATAGCCTTTGCTTTC | SEQ ID NO:198 | −16.4 | −23.5 | 70.4 | −5.7 | −1.3 | −5.5 |
| 545 | CTGTTTCAGATTCGAAGTCA | SEQ ID NO:199 | −16.4 | −21.5 | 65 | −4.5 | −0.1 | −8.5 |
| 607 | GGTATCTTGACTTTCCCGAT | SEQ ID NO:200 | −16.4 | −25.2 | 71.6 | −8.8 | 0 | −2.8 |
| 1059 | CCCTTCATGATCTGCTGGAG | SEQ ID NO:201 | −16.4 | −26.5 | 74.9 | −10.1 | 0 | −6.4 |
| 1318 | CAGGAAGTCACTTGCTAGTT | SEQ ID NO:202 | −16.4 | −23 | 69.3 | −6.6 | 0 | −1.7 |
| 1320 | TCCAGGAAGTCACTTGCTAG | SEQ ID NO:203 | −16.4 | −24.1 | 71 | −7.7 | 0 | 4.7 |
| 1589 | GATCATCACACATCATAAGG | SEQ ID NO:204 | −16.4 | −19.9 | 60.6 | −3.5 | 0 | −4.7 |
| 2193 | TGTTGCTTAATCATACAGTT | SEQ ID NO:205 | −16.4 | −20.1 | 62.2 | −3.7 | 0 | −3.6 |
| 384 | GTATGAGCTATTCCAAGGTG | SEQ ID NO:206 | −16.3 | −22.8 | 67.9 | −6.5 | 0 | 4.5 |
| 2200 | TGTCTTGTGTTGCTTAATCA | SEQ ID NO:207 | −16.3 | −22 | 67.5 | −5.7 | 0 | −3.6 |
| 2862 | TCCAAAGCAGCTTGAATTTA | SEQ ID NO:208 | −16.3 | −20.8 | 61.4 | −3.9 | 0 | −8.4 |
| 2870 | GTCAGTTGTCCAAAGCAGCT | SEQ ID NO:209 | −16.3 | −25.7 | 75 | −8.8 | −0.3 | −6.1 |
| 395 | TTGCCCAACGGGTATGAGCT | SEQ ID NO:210 | −16.2 | −27.5 | 74.2 | −10 | −1.2 | −7.5 |
| 410 | TGGGTTCTCCATGTGTTGCC | SEQ ID NO:211 | −16.2 | −28.4 | 81.5 | −10.9 | −1.2 | −5 |
| 865 | TGCTTTTTCTTCCACCGGGA | SEQ ID NO:212 | −16.2 | −27.6 | 76.2 | −10.4 | −0.9 | −7.1 |
| 1192 | GATCTCCTTTATGTGATCCT | SEQ ID NO:213 | −16.2 | −24.2 | 71.5 | −7.3 | −0.4 | −4.4 |
| 2241 | CAAGGGGTGATATTTTAAAT | SEQ ID NO:215 | −16.2 | −17.7 | 55.1 | −1.4 | 0 | −4.5 |
| 84 | GCGAGGCCAGGGGCGAGTGG | SEQ ID NO:215 | −16.1 | −32.1 | 84.3 | −14.3 | −1.7 | −7.7 |
| 156 | TCTCGTCTCGTTCGAGGAAC | SEQ ID NO:216 | −16.1 | −24.6 | 70.5 | −6 | −2.5 | −9.1 |
| 327 | TTGTGAACTTCTTCATCCAG | SEQ ID NO:217 | −16.1 | −22 | 66.2 | −4.5 | −1.3 | −5.1 |
| 1147 | GTCATCAAAGTTGACTCTTC | SEQ ID NO:218 | −16.1 | −20.8 | 64.6 | −3.4 | −1.2 | −6 |
| 1196 | TCTGGATCTCCTTTATGTGA | SEQ ID NO:219 | −16.1 | −23.4 | 70.2 | −7.3 | 0 | −5.3 |
| 1317 | AGGAAGTCACTTGCTAGTTC | SEQ ID NO:220 | −16.1 | −22.7 | 69.8 | −6.6 | 0 | −1.7 |
| 1793 | AAGTAATTTCTTTGATTTTC | SEQ ID NO:221 | −16.1 | −16.5 | 54.4 | 0.6 | 0 | −3.5 |
| 1981 | CTCAGTATCCTCCTTATCAC | SEQ ID NO:222 | −16.1 | −24.6 | 73 | −8.5 | 0 | −1.6 |
| 2588 | TTCCCTAACTGTCCAAGTAT | SEQ ID NO:223 | −16.1 | −24 | 68.8 | −7.2 | −0.5 | −3.2 |
| 332 | GTTGCTTGTGAACTTCTTCA | SEQ ID NO:224 | −16 | −22.9 | 69.3 | −5.7 | −1.1 | −5.8 |
| 333 | TGTTGCTTGTGAACTTCTTC | SEQ ID NO:225 | −16 | −22.2 | 67.9 | −5.7 | 0.1 | 4.9 |
| 1529 | TTGTACTGGCCACACCAATC | SEQ ID NO:226 | −16 | −25.3 | 71 | −8 | −1.2 | −8.4 |
| 1590 | CGATCATCACACATCATAAG | SEQ ID NO:227 | −16 | −19.5 | 58.7 | −3.5 | 0 | −4.9 |
| 1779 | ATTTTCAGTGCCCCTTCAAG | SEQ ID NO:228 | −16 | −25.8 | 73.2 | −9.8 | 0 | −3.2 |
| 398 | GTGTTGCCCAACGGGTATGA | SEQ ID NO:229 | −15.9 | −27.2 | 74.3 | −10 | −1.2 | 7.7 |
| 2240 | AAGGGGTGATATTTTAAATC | SEQ ID NO:230 | −15.9 | −17.4 | 55.1 | −1.4 | 0 | −4.5 |
| 2668 | AGTTTTACAGTTTGATTTAA | SEQ ID NO:231 | −15.9 | −17.3 | 56.2 | −1.3 | 0 | −2.6 |
| 183 | AGGCCTTTGATTAGGGTCTC | SEQ ID NO:232 | −15.8 | −25.8 | 76.5 | −9.3 | −0.5 | −7.9 |
| 529 | GTCATAGCCTTTGCTTTCA | SEQ ID NO:233 | −15.8 | −26.9 | 77.6 | −10 | −1 | −4.5 |
| 1977 | GTATCCTCCTTATCACAAAT | SEQ ID NO:234 | −15.8 | −21.9 | 64.5 | −6.1 | 0 | −1.9 |
| 1978 | AGTATCCTCCTTATCACAAA | SEQ ID NO:235 | −15.8 | −21.9 | 64.7 | −6.1 | 0 | −2.7 |
| 1994 | TGTTCTTAATGGTCTCAGTA | SEQ ID NO:236 | −15.8 | −21.4 | 66.9 | −5.6 | 0 | −2.6 |
| 2256 | ACTAAAAAAAGGCTTCAAGG | SEQ ID NO:237 | −15.8 | −16.2 | 51.2 | 2.3 | 0 | −3.7 |
| 2523 | ACTCTTTCACTGGTCTGAAT | SEQ ID NO:238 | −15.8 | −22.4 | 67.8 | −6.6 | 0 | −3.6 |
| 182 | GGCCTTTGATTAGGGTCTCC | SEQ ID NO:239 | −15.7 | −27.8 | 79.9 | −11.5 | −0.3 | −6.4 |
| 334 | TTGTTGCTTGTGAACTTCTT | SEQ ID NO:240 | −15.7 | −21.9 | 66.7 | −5.7 | −0.1 | −4.9 |
| 418 | GACAGGACTGGGTTCTCCAT | SEQ ID NO:241 | −15.7 | −26.5 | 76.3 | −9.5 | −1.2 | −6.9 |
| 419 | TGACAGGACTGGGTTCTCCA | SEQ ID NO:242 | −15.7 | −26.5 | 76.2 | −9.5 | −1.2 | −6.9 |
| 1195 | CTGGATCTCCTTTATGTGAT | SEQ ID NO:243 | −15.7 | −23 | 68.5 | −7.3 | 0 | −5.3 |
| 2238 | GGGGTGATATTTTAAATCAA | SEQ ID NO:244 | −15.7 | −18.1 | 56.2 | −1.4 | −0.8 | 5.4 |
| 8 | GCCGGGGTGGCGCCGACACG | SEQ ID NO:245 | −15.6 | −34.3 | 82.8 | −16 | −2.6 | −12.6 |
| 486 | TTGGTGATGATTCCATTGTG | SEQ ID NO:246 | −15.6 | −22.2 | 66.2 | −5.9 | −0.5 | −4.1 |
| 1058 | CCTTCATGATCTGCTGGAGT | SEQ ID NO:247 | −15.6 | −25.7 | 74.7 | −10.1 | 0 | −7.1 |
| 1304 | CTAGTTCCACCATCACAGGC | SEQ ID NO:248 | −15.6 | −26.9 | 76.5 | −11.3 | 0 | −3.7 |
| 1305 | GCTAGTTCCACCATCACAGG | SEQ ID NO:249 | −15.6 | −26.9 | 76.5 | −11.3 | 0 | −4.1 |
| 483 | GTGATGATTCCATTGTGAAT | SEQ ID NO:250 | −15.5 | −20.8 | 62.5 | −4.6 | −0.5 | −6 |
| 720 | GGGCTACCTCGCCTTGTGCC | SEQ ID NO:251 | −15.5 | −32.9 | 87.1 | −15.4 | −2 | −7.6 |
| 1074 | AATGAACTGAAGTTGCCCTT | SEQ ID NO:252 | −15.5 | −22.3 | 63.8 | −6.8 | 0 | −5.7 |
| 1583 | CACACATCATAAGGGCAAAC | SEQ ID NO:253 | −15.5 | −20.3 | 59.7 | −4.8 | 0 | −4 |
| 1642 | CAGCCGTTTCAATCCAAGCA | SEQ ID NO:254 | −15.5 | −26 | 71.2 | −10 | −0.2 | −4.1 |
| 1789 | AATTTCTTTGATTTTCAGTG | SEQ ID NO:255 | −15.5 | −18.2 | 58.3 | −2.7 | 0 | −3.5 |
| 2876 | CATATTGTCAGTTGTCAAA | SEQ ID NO:256 | −15.5 | −21 | 63.3 | −5.5 | 0 | −3.5 |
| 32 | GGTGGGCAATCTGCGGGCTC | SEQ ID NO:257 | −15.4 | −30 | 82.4 | −13.1 | −1.4 | −6.9 |
| 390 | CAACGGGTATGAGCTATTCC | SEQ ID NO:258 | −15.4 | −23.8 | 67.8 | −8.4 | 0 | −5.2 |
| 548 | TGTCTGTTTCAGATTCGAAG | SEQ ID NO:259 | −15.4 | −20.8 | 63.7 | −3.8 | −1.4 | −10.4 |
| 719 | GGCTACCTCGCCTTGTGCCA | SEQ ID NO:260 | −15.4 | −32.4 | 85.5 | −15.4 | −1.6 | −7.1 |
| 722 | GAGGGCTACCTCGCCTTGTG | SEQ ID NO:261 | −15.4 | −29.7 | 81.1 | −11.2 | −3.1 | −9.6 |
| 1193 | GGATCTCCTTTATGTGATCC | SEQ ID NO:262 | −15.4 | −24.5 | 72.1 | −7.3 | −1.8 | −6.2 |
| 1308 | CTTGCTAGTTCCACCATCAC | SEQ ID NO:263 | −15.4 | −26 | 74.6 | −10.6 | 0 | −4.1 |
| 2563 | TACACTGCCACTGGCTTTAG | SEQ ID NO:264 | −15.4 | −25.1 | 71.9 | −7.6 | −2.1 | −9.7 |
| 2875 | ATATTGTCAGTTGTCCAAAG | SEQ ID NO:265 | −15.4 | −20.3 | 62.3 | −4.9 | 0 | −3.5 |
| 162 | AGGATTTCTCGTCTCGTTCG | SEQ ID NO:266 | −15.3 | −24.7 | 71.6 | −8.9 | −0.1 | 4.1 |
| 606 | GTATCTTGACTTTCCCGATT | SEQ ID NO:267 | −15.3 | −24.1 | 69.4 | −8.8 | 0 | −2.8 |
| 860 | TTTCTTCCACCGGGAAAAGG | SEQ ID NO:268 | −15.3 | −23.8 | 65.9 | −6.5 | −2 | −7.1 |
| 1794 | TAAGTAATTTCTTTGATTTT | SEQ ID NO:269 | −15.3 | −15.8 | 52.5 | 0.6 | −0.2 | −3.5 |
| 2210 | ATACAAAAGGTGTCTTGTGT | SEQ ID NO:270 | −15.3 | −19.9 | 61.3 | −2.6 | −2 | −5.5 |
| 2262 | GGATTTACTAAAAAAAGGCT | SEQ ID NO:271 | −15.3 | −16.2 | 51.3 | −0.7 | 0 | −3.7 |
| 314 | CATCCAGTGCCTTAACTTTT | SEQ ID NO:272 | −15.2 | −24.2 | 69.6 | −9 | 0 | −3.6 |
| 402 | CCATGTGTTGCCCAACGGGT | SEQ ID NO:273 | −15.2 | −29.6 | 77.9 | −13.1 | −1.2 | −7.7 |
| 413 | GACTGGGTTCTCCATGTGTT | SEQ ID NO:274 | −15.2 | −26.3 | 77.4 | −9.8 | −1.2 | −4.7 |
| 557 | TTGTCTCTGTGTCTGTTTCA | SEQ ID NO:275 | −15.2 | −24.1 | 75.6 | −8.9 | 0 | −1.9 |
| 1524 | CTGGCCACACCAATCTCAGG | SEQ ID NO:276 | −15.2 | −27.3 | 74.8 | −10.8 | −1.2 | −8.4 |
| 1795 | ATAAGTAATTTCTTTGATTT | SEQ ID NO:277 | −15.2 | −15.7 | 52.2 | 0.6 | −0.2 | −3.5 |
| 2209 | TACAAAAGGTGTCTTGTGTT | SEQ ID NO:278 | −15.2 | −20 | 61.6 | −2.6 | −2.2 | −5.3 |
| 2259 | TTTACTAAAAAAAGGCTTCA | SEQ ID NO:279 | −15.2 | −15.6 | 50.4 | 2.3 | 0 | −3.7 |
| 2515 | ACTGGTCTGAATGAAGTATG | SEQ ID NO:280 | −15.2 | −19.5 | 60 | −4.3 | 0 | −2.6 |
| 2561 | CACTGCCACTGGCTTTAGAT | SEQ ID NO:281 | −15.2 | −25.8 | 73.2 | −8.5 | −2.1 | 9.7 |
| 2667 | GTTTTACAGTTTGATTTAAA | SEQ ID NO:282 | −15.2 | −16.6 | 54.1 | −1.3 | 0 | −4.6 |
| 319 | TTCTTCATCCAGTGCCTTAA | SEQ ID NO:283 | −15.1 | −24.7 | 71.9 | −9.6 | 0 | −3.6 |
| 417 | ACAGGACTGGGTTCTCCATG | SEQ ID NO:284 | −15.1 | −25.9 | 74.8 | −9.5 | −1.2 | −6.9 |
| 491 | TGTAGTTGGTGATGATTCCA | SEQ ID NO:285 | −15.1 | −23 | 69 | −7.3 | −0.3 | −3.7 |
| 556 | TGTCTCTGTGTCTGTTTCAG | SEQ ID NO:286 | −15.1 | −24 | 75.6 | −8.9 | 0 | −3.7 |
| 1073 | ATGAACTGAAGTTGCCCTTC | SEQ ID NO:287 | −15.1 | −23.4 | 67.3 | −6.8 | −1.4 | −6.4 |
| 1998 | TTTGTGTTCTTAATGGTCTC | SEQ ID NO:288 | −15.1 | −21.2 | 66.7 | −6.1 | 0 | −2.3 |
| 2199 | GTCTTGTGTTGCTTAATCAT | SEQ ID NO:289 | −15.1 | −22 | 67.6 | −6.9 | 0 | −3.6 |
| 35 | TTCGGTGGGCAATCTGCGGG | SEQ ID NO:290 | −15 | −28.2 | 76.2 | −11 | −2.2 | −6.6 |
| 99 | CCGGAGACACGGCCCGCGAG | SEQ ID NO:291 | −15 | −32.1 | 77.8 | −15.9 | −1.1 | −9.2 |
| 1041 | AGTTCCATCTGGAGTGTTTG | SEQ ID NO:292 | −15 | −24.1 | 72.9 | −8.6 | −0.2 | 6.9 |
| 1148 | AGTCATCAAAGTTGACTCTT | SEQ ID NO:293 | −15 | −20.4 | 63.3 | −3.4 | −2 | −6.5 |
| 1534 | AGCCTTTGTACTGGCCACAC | SEQ ID NO:294 | −15 | −27.7 | 77.5 | −10.8 | −1.9 | −8.4 |
| 2190 | TGCTTAATCATACAGTTTCG | SEQ ID NO:295 | −15 | −20.1 | 61.1 | −5.1 | 0 | −3.6 |
| 2244 | CTTCAAGGGGTGATATTTTA | SEQ ID NO:296 | −15 | −20.5 | 62.7 | −4.9 | −0.3 | −3.1 |
| 2522 | CTCTTTCACTGGTCTGAATG | SEQ ID NO:297 | −15 | −22.2 | 67.1 | −6.6 | −0.3 | −3.6 |
| 313 | ATCCAGTGCCTTAACTTTTC | SEQ ID NO:298 | −14.9 | −23.9 | 70.1 | −9 | 0 | −3.6 |
| 330 | TGCTTGTGAACTTCTTCATC | SEQ ID NO:299 | −14.9 | −22 | 67.1 | −5.7 | −1.3 | −6 |
| 389 | AACGGGTATGAGCTATTCCA | SEQ ID NO:300 | −14.9 | −23.8 | 67.8 | −8.4 | −0.1 | −5.2 |
| 414 | GGACTGGGTTCTCCATGTGT | SEQ ID NO:301 | −14.9 | −27.4 | 79.8 | −11.2 | −1.2 | −6.2 |
| 853 | CACCGGGAAAAGGCAGGTTG | SEQ ID NO:302 | −14.9 | −24.8 | 67.6 | −9.4 | −0.1 | −7.1 |
| 1066 | GAAGTTGCCCTTCATGATCT | SEQ ID NO:303 | −14.9 | −25 | 71.8 | −8.3 | −1.8 | −8.5 |
| 155 | CTCGTCTCGTTCGAGGAACA | SEQ ID NO:304 | −14.8 | −24.9 | 70 | −8.2 | −1.9 | −8.8 |
| 397 | TGTTGCCCAACGGGTATGAG | SEQ ID NO:305 | −14.8 | −26 | 71.4 | −10 | −1.1 | −7.7 |
| 420 | TTGACAGGACTGGGTTCTCC | SEQ ID NO:306 | −14.8 | −25.9 | 75.4 | −10.6 | −0.1 | −5.9 |
| 449 | TATTTTTATCAGAGCGCTGG | SEQ ID NO:307 | −14.8 | −22 | 65.5 | −5.9 | −1.2 | −9.4 |
| 1045 | CTGGAGTTCCATCTGGAGTG | SEQ ID NO:308 | −14.8 | −25.4 | 74.8 | −10 | −0.3 | −6.9 |
| 1067 | TGAAGTTGCCCTTCATGATC | SEQ ID NO:309 | −14.8 | −24.1 | 69.7 | −6.8 | −2.5 | −8.5 |
| 1072 | TGAACTGAAGTTGCCCTTCA | SEQ ID NO:310 | −14.8 | −24.1 | 68.5 | −6.8 | −2.5 | −8.5 |
| 1526 | TACTGGCCACACCAATCTCA | SEQ ID NO:311 | −14.8 | −26 | 72.1 | −9.9 | −1.2 | −8.4 |
| 1796 | TATAAGTAATTTCTTTGATT | SEQ ID NO:312 | −14.8 | −15.3 | 51.3 | 0.6 | −0.2 | −3.5 |
| 1999 | TTTTGTGTTCTTAATGGTCT | SEQ ID NO:313 | −14.8 | −20.9 | 65.4 | −6.1 | 0 | −2.3 |
| 2591 | CCCTTCCCTAACTGTCCAAG | SEQ ID NO:315 | −14.8 | −28 | 75 | −13.2 | 0 | −3.2 |
| 2934 | GAAAACACAAAGTAGTAGGA | SEQ ID NO:315 | −14.8 | −16.5 | 52.4 | −1.7 | 0 | −3 |
| 92 | CACGGCCCGCGAGGCCAGGG | SEQ ID NO:316 | −14.7 | −34.8 | 84.3 | −15.2 | −4.7 | −17.4 |
| 248 | CTTTATCATTGCCTCCATCA | SEQ ID NO:317 | −14.7 | −24.9 | 71.7 | −10.2 | 0 | −3 |
| 435 | CGCTGGGGGTGGCTATTGAC | SEQ ID NO:318 | −14.7 | −28 | 77.6 | −12.8 | −0.2 | −4.3 |
| 1071 | GAACTGAAGTTGCCCTTCAT | SEQ ID NO:319 | −14.7 | −24.1 | 68.6 | −6.8 | −2.6 | −8.7 |
| 1075 | AAATGAACTGAAGTTGCCCT | SEQ ID NO:320 | −14.7 | −21.5 | 61.6 | −6.8 | 0 | −5.1 |
| 1321 | GTCCAGGAAGTCACTTGCTA | SEQ ID NO:321 | −14.7 | −25.3 | 74.2 | −10.6 | 0 | −5.5 |
| 1523 | TGGCCACACCAATCTCAGGA | SEQ ID NO:322 | −14.7 | 27 | 74.3 | −11.1 | −1.2 | −8.3 |
| 1797 | ATATAAGTAATTTCTTTGAT | SEQ ID NO:323 | −14.7 | −15.2 | 51 | 0.2 | −0.2 | −3.5 |
| 1976 | TATCCTCCTTATCACAAATT | SEQ ID NO:324 | −14.7 | −20.8 | 61.8 | −6.1 | 0 | −2.9 |
| 2877 | TCATATTGTCAGTTGTCCAA | SEQ ID NO:325 | −14.7 | −22.1 | 67.1 | −7.4 | 0 | −3.3 |
| 325 | GTGAACTTCTTCATCCAGTG | SEQ ID NO:326 | −14.6 | −23.1 | 69.2 | −7.1 | −1.3 | 5.7 |
| 331 | TTGCTTGTGAACTTCTTCAT | SEQ ID NO:327 | −14.6 | −21.7 | 65.9 | −5.7 | −1.3 | −6 |
| 387 | CGGGTATGAGCTATTCCAAG | SEQ ID NO:328 | −14.6 | −23.6 | 67.5 | −8.5 | −0.1 | −5.2 |
| 1049 | TCTGCTGGAGTTCCATCTGG | SEQ ID NO:329 | −14.6 | −26.7 | 77.9 | −11.6 | −0.1 | 6.1 |
| 2521 | TCTTTCACTGGTCTGAATGA | SEQ ID NO:330 | −14.6 | −21.9 | 66.4 | −6.6 | −0.5 | −3.9 |
| 2565 | CATACACTGCCACTGGCTTT | SEQ ID NO:331 | −14.6 | −26.1 | 73.3 | −9.4 | −2.1 | −9.7 |
| 2568 | GAGCATACACTGCCACTGGC | SEQ ID NO:332 | −14.6 | −27.4 | 76.5 | −11.1 | −1.7 | −8.7 |
| 2932 | AAACACAAAGTAGTAGGATA | SEQ ID NO:333 | −14.6 | −16.3 | 52.4 | −1.7 | 0 | −3 |
| 317 | CTTCATCCAGTGCCTTAACT | SEQ ID NO:334 | −14.5 | −25.3 | 72.4 | −10.8 | 0 | −3.6 |
| 1582 | ACACATCATAAGGGCAAACA | SEQ ID NO:335 | −14.5 | −20.3 | 59.7 | −5.8 | 0 | −4 |
| 2001 | CTTTTTGTGTTCTTAATGGT | SEQ ID NO:336 | −14.5 | −20.6 | 64.2 | −6.1 | 0 | −2.3 |
| 2235 | GTGATATTTTAAATCAAGGT | SEQ ID NO:337 | −14.5 | −16.9 | 54.2 | −1.4 | −0.8 | −5.4 |
| 2236 | GGTGATATTTTAAATCAAGG | SEQ ID NO:338 | −14.5 | −16.9 | 53.9 | −1.4 | −0.8 | −5.4 |
| 2237 | GGGTGATATTTTAAATCAAG | SEQ ID NO:339 | −14.5 | −16.9 | 53.9 | −1.4 | −0.8 | −5.4 |
| 2260 | ATTTACTAAAAAAAGGCTTC | SEQ ID NO:340 | −14.5 | −14.9 | 49.2 | 0.9 | 0 | −3.7 |
| 2564 | ATACACTGCCACTGGCTTTA | SEQ ID NO:341 | −14.5 | −25.1 | 71.6 | −8.5 | −2.1 | −9.7 |
| 207 | TATCCTCTGTACTCCAGTCT | SEQ ID NO:342 | −14.4 | −25.9 | 77.1 | −10.6 | −0.8 | −4.8 |
| 328 | CTTGTGAACTTCTTCATCCA | SEQ ID NO:343 | −14.4 | −22.9 | 67.9 | −7.1 | −1.3 | −4.2 |
| 555 | GTCTCTGTGTCTGTTTCAGA | SEQ ID NO:344 | −14.4 | −24.6 | 77.4 | −8.9 | −1.2 | −6.1 |
| 631 | TCTCTCCACCAAGGTAGTAA | SEQ ID NO:345 | −14.4 | −24.2 | 70.5 | −9.8 | 0.1 | −5.1 |
| 852 | ACCGGGAAAAGGCAGGTTGT | SEQ ID NO:346 | −14.4 | −25.3 | 69.5 | −10.9 | 0 | −7.1 |
| 861 | TTTTCTTCCACCGGGAAAAG | SEQ ID NO:347 | −14.4 | −22.7 | 63.9 | −6.5 | −1.8 | −7.8 |
| 921 | ACGCGATTGGTGTGTTCTAT | SEQ ID NO:348 | −14.4 | −24.2 | 69.7 | −9.2 | −0.2 | −7.9 |
| 1149 | TAGTCATCAAAGTTGACTCT | SEQ ID NO:349 | −14.4 | −20 | 62.3 | −3.4 | −2.2 | −7 |
| 1298 | CCACCATCACAGGCAACTCA | SEQ ID NO:350 | −14.4 | −26.8 | 73.3 | −11.5 | −0.8 | −4.5 |
| 1306 | TGCTAGTTCCACCATCACAG | SEQ ID NO:351 | −14.4 | −25.7 | 73.7 | −11.3 | 0 | −4.1 |
| 1995 | GTGTTCTTAATGGTCTCAGT | SEQ ID NO:352 | −14.4 | −22.9 | 71.3 | −8.5 | 0 | −2.4 |
| 2233 | GATATTTTAAATCAAGGTTT | SEQ ID NO:353 | −14.4 | −15.9 | 52.1 | −1.4 | 0 | −4.2 |
| 2258 | TTACTAAAAAAAGGCTTCAA | SEQ ID NO:354 | −14.4 | −14.8 | 48.6 | 2.3 | 0 | 3.7 |
| 2263 | AGGATTTACTAAAAAAAGGC | SEQ ID NO:355 | −14.4 | −15.3 | 49.7 | −0.7 | 0 | −2.9 |
| 100 | GCCGGAGACACGGCCCGCGA | SEQ ID NO:356 | −14.3 | −33.9 | 81.1 | −15.9 | −3.4 | −15.2 |
| 536 | ATTCGAAGTCATAGCCTTTG | SEQ ID NO:357 | −14.3 | −22.1 | 65.2 | −7.8 | 0 | −7.1 |
| 551 | CTGTGTCTGTTTCAGATTCG | SEQ ID NO:358 | −14.3 | −23 | 69.7 | −7.7 | −0.9 | −5.9 |
| 862 | TTTTTCTTCCACCGGGAAAA | SEQ ID NO:359 | −14.3 | −22.8 | 64 | −6.5 | −2 | −8 |
| 1042 | GAGTTCCATCTGGAGTGTTT | SEQ ID NO:360 | −14.3 | −24.7 | 74.6 | −9.9 | −0.2 | −6.9 |
| 1194 | TGGATCTCCTTTATGTGATC | SEQ ID NO:361 | −14.3 | −22.5 | 68.1 | −7.3 | −0.8 | −5.3 |
| 1323 | CTGTCCAGGAAGTCACTTGC | SEQ ID NO:362 | −14.3 | −25.6 | 74.6 | −11.3 | 0 | −5.5 |
| 1799 | GCATATAAGTAATTTCTTTG | SEQ ID NO:363 | −14.3 | −17.1 | 55 | −2.3 | −0.2 | −3.6 |
| 2257 | TACTAAAAAAAGGCTTCAAG | SEQ ID NO:364 | −14.3 | −14.7 | 48.4 | 2.3 | 0 | −3.7 |
| 2556 | CCACTGGCTTTAGATACTCC | SEQ ID NO:365 | −14.3 | −25.4 | 72.6 | −11.1 | 0 | −3.7 |
| 2878 | ATCATATTGTCAGTTGTCCA | SEQ ID NO:366 | −14.3 | −22.8 | 69.5 | −8.5 | 0 | −2.1 |
| 494 | CTTTGTAGTTGGTGATGATT | SEQ ID NO:367 | −14.2 | −21 | 65 | −6.8 | 0 | −1.8 |
| 544 | TGTTTCAGATTCGAAGTCAT | SEQ ID NO:368 | −14.2 | −20.6 | 63 | −5.9 | −0.1 | −7.6 |
| 806 | TTCCTTTCTTGTCTTTGCCT | SEQ ID NO:369 | −14.2 | −26.4 | 77.6 | −12.2 | 0 | −3 |
| 807 | CTTCCTTTCTTGTCTTTGCC | SEQ ID NO:370 | −14.2 | −26.4 | 77.6 | −12.2 | 0 | −3 |
| 1054 | CATGATCTGCTGGAGTTCCA | SEQ ID NO:371 | −14.2 | −25.5 | 73.8 | −10.8 | −0.2 | −6.1 |
| 1773 | AGTGCCCCTTCAAGACAAGT | SEQ ID NO:372 | −14.2 | −26.4 | 73.6 | −12.2 | 0 | −3 |
| 1778 | TTTTCAGTGCCCCTTCAAGA | SEQ ID NO:373 | −14.2 | −26.4 | 74.5 | −12.2 | 0 | −3.8 |
| 1906 | CTTGGCATAAGTGTGATCTC | SEQ ID NO:374 | −14.2 | −22.4 | 67.8 | −8.2 | 0 | −6.5 |
| 2853 | GCTTGAATTTAAAGTTTGTG | SEQ ID NO:375 | −14.2 | −17.8 | 56.2 | −3.6 | 0 | −4.9 |
| 2933 | AAAACACAAAGTAGTAGGAT | SEQ ID NO:376 | −14.2 | −15.9 | 51.2 | −1.7 | 0 | −3 |
| 2935 | TGAAAACACAAAGTAGTAGG | SEQ ID NO:377 | −14.2 | −15.9 | 51.2 | −1.7 | 0 | −3 |
| 247 | TTTATCATTGCCTCCATCAA | SEQ ID NO:378 | −14.1 | −23.3 | 67.5 | −9.2 | 0 | −3 |
| 376 | TATTCCAAGGTGTACATCAA | SEQ ID NO:379 | −14.1 | −20.8 | 62.5 | −6.2 | 0 | −7.9 |
| 724 | CAGAGGGCTACCTCGCCTTG | SEQ ID NO:380 | −14.1 | −29.2 | 79.1 | −11.2 | −3.9 | −9.6 |
| 1197 | CTCTGGATCTCCTTTATGTG | SEQ ID NO:381 | −14.1 | −23.7 | 70.9 | −9.6 | 0 | −5.3 |
| 1535 | AAGCCTTTGTACTGGCCACA | SEQ ID NO:382 | −14.1 | −26.8 | 74.5 | −10.8 | −1.9 | −8.4 |
| 1980 | TCAGTATCCTCCTTATCACA | SEQ ID NO:383 | −14.1 | −24.4 | 72.2 | −10.3 | 0 | −2.7 |
| 2211 | AATACAAAAGGTGTCTTGTG | SEQ ID NO:384 | −14.1 | −18 | 56.2 | −2.6 | −1.2 | −5.7 |
| 3050 | TTTAATAGCAGCTCTGTGTT | SEQ ID NO:385 | −14.1 | −21.9 | 67.1 | −7.8 | 0 | −6.1 |
| 453 | TCATTATTTTTATCAGAGCG | SEQ ID NO:386 | −14 | −19.3 | 59.8 | −5.3 | 0 | 4.1 |
| 539 | CAGATTCGAAGTCATAGCCT | SEQ ID NO:387 | −14 | −23.2 | 67.3 | −8.7 | −0.1 | −7.6 |
| 1640 | GCCGTTTCAATCCAAGCATG | SEQ ID NO:388 | −14 | −25.3 | 69.7 | −11.3 | 0 | −4.3 |
| 2000 | TTTTTGTGTTCTTAATGGTC | SEQ ID NO:389 | −14 | −20.1 | 63.6 | −6.1 | 0 | −2.3 |
| 2212 | AAATACAAAAGGTGTCTTGT | SEQ ID NO:390 | −14 | −17.3 | 54.5 | −2.6 | −0.4 | −5.5 |
| 2261 | GATTTACTAAAAAAAGGCTT | SEQ ID NO:391 | −14 | −15.1 | 49.3 | −1 | 0 | −3.7 |
| 2669 | AAGTTTTACAGTTTGATTTA | SEQ ID NO:392 | −14 | −17.3 | 56.2 | −3.3 | 0 | −2.6 |
| 3049 | TTAATAGCAGCTCTGTGTTG | SEQ ID NO:393 | −14 | −21.8 | 66.6 | −7.8 | 0 | −5.8 |
| 3051 | ATTTAATAGCAGCTCTGTGT | SEQ ID NO:394 | −14 | −21.8 | 66.7 | −7.8 | 0 | −6.1 |
| 180 | CCTTTGATTAGGGTCTCCAG | SEQ ID NO:395 | −13.9 | −25.5 | 74.1 | −10.4 | −1.1 | −4.1 |
| 184 | AAGGCCTTTGATTAGGGTCT | SEQ ID NO:396 | −13.9 | −24.7 | 72.1 | −9.3 | −0.7 | −10.9 |
| 558 | ATTGTCTCTGTGTCTGTTTC | SEQ ID NO:397 | −13.9 | −23.4 | 74.3 | −9.5 | 0 | −0.6 |
| 821 | GAGAGAGATTGCAGCTTCCT | SEQ ID NO:398 | −13.9 | −25.1 | 73.7 | −11.2 | 0 | −5.3 |
| 1191 | ATCTCCTTTATGTGATCCTT | SEQ ID NO:399 | −13.9 | −23.7 | 70.5 | −9.8 | 0 | −4.3 |
| 1772 | GTGCCCCTTCAAGACAAGTA | SEQ ID NO:400 | −13.9 | −26.1 | 72.8 | −12.2 | 0 | −3 |
| 2066 | ACTGTAAAGGGATCACGCTG | SEQ ID NO:401 | −13.9 | −22.4 | 64.6 | −7.1 | −1.3 | −6.6 |
| 2189 | GCTTAATCATACAGTTTCGT | SEQ ID NO:402 | −13.9 | −21.3 | 64.3 | −7.4 | 0 | −3 |
| 2232 | ATATTTTAAATCAAGGTTTT | SEQ ID NO:403 | −13.9 | −15.4 | 51.1 | −1.4 | 0 | −4.5 |
| 2579 | TGTCCAAGTATGAGCATACA | SEQ ID NO:404 | −13.9 | −22.2 | 65.9 | −6.8 | −1.4 | −9.6 |
| 2938 | AGATGAAAACACAAAGTAGT | SEQ ID NO:405 | −13.9 | −15.6 | 50.6 | −1.7 | 0 | −2.9 |
| 29 | GGGCAATCTGCGGGCTCGGG | SEQ ID NO:406 | −13.8 | −30.8 | 81.1 | −14.8 | −2.2 | −8.4 |
| 1091 | ATATTTCCTTCTGCATAAAT | SEQ ID NO:407 | −13.8 | −19.4 | 59.2 | −5.6 | 0 | −4.9 |
| 1530 | TTTGTACTGGCCACACCAAT | SEQ ID NO:408 | −13.8 | −25 | 69.8 | −9.9 | −1.2 | −8.4 |
| 2005 | CGTTCTTTTTGTGTTCTTAA | SEQ ID NO:409 | −13.8 | −20.7 | 63.9 | −6.9 | 0 | −2 |
| 2874 | TATTGTCAGTTGTCCAAAGC | SEQ ID NO:410 | −13.8 | −22.1 | 66.6 | −8.3 | 0 | −3.5 |
| 316 | TTCATCCAGTGCCTTAACTT | SEQ ID NO:411 | −13.7 | −24.5 | 70.9 | −10.8 | 0 | −3.6 |
| 374 | TTCCAAGGTGTACATCAAAT | SEQ ID NO:412 | −13.7 | −20.4 | 61 | −6.2 | 0 | −7.9 |
| 375 | ATTCCAAGGTGTACATCAAA | SEQ ID NO:413 | −13.7 | −20.4 | 61 | −6.2 | 0 | −7.9 |
| 549 | GTGTCTGTTTCAGATTCGAA | SEQ ID NO:415 | −13.7 | −22 | 66.8 | −6.7 | −1.4 | −10.2 |
| 804 | CCTTTCTTGTCTTTGCCTGT | SEQ ID NO:415 | −13.7 | −27.1 | 78.8 | −13.4 | 0 | −3 |
| 920 | CGCGATTGGTGTGTTCTATG | SEQ ID NO:416 | −13.7 | −24 | 69 | −10.3 | 0 | −6.4 |
| 1046 | GCTGGAGTTCCATCTGGAGT | SEQ ID NO:417 | −13.7 | −27.2 | 79.6 | −12.9 | −0.3 | −6.9 |
| 1057 | CTTCATGATCTGCTGGAGTT | SEQ ID NO:418 | −13.7 | −23.8 | 71.3 | −10.1 | 0 | −7.1 |
| 1069 | ACTGAAGTTGCCCTTCATGA | SEQ ID NO:419 | −13.7 | −24.8 | 70.7 | −8.5 | −2.6 | −8.7 |
| 1774 | CAGTGCCCCTTCAAGACAAG | SEQ ID NO:420 | −13.7 | −25.9 | 71.4 | −12.2 | 0 | −3 |
| 2002 | TCTTTTTGTGTTCTTAATGG | SEQ ID NO:421 | −13.7 | −19.8 | 62.4 | −6.1 | 0 | −2.3 |
| 2234 | TGATATTTTAAATCAAGGTT | SEQ ID NO:422 | −13.7 | −15.8 | 51.7 | −1.4 | −0.4 | −4.7 |
| 2524 | TACTCTTTCACTGGTCTGAA | SEQ ID NO:423 | −13.7 | −22.1 | 67.2 | −7.9 | −0.1 | −3.5 |
| 2855 | CAGCTTGAATTTAAAGTTTG | SEQ ID NO:424 | −13.7 | −17.3 | 54.8 | −3.6 | 0 | −4.9 |
| 1127 | CTCTCATTGTGTTCACGACA | SEQ ID NO:425 | −13.6 | −23.5 | 69.4 | −9.2 | −0.5 | −6.4 |
| 11307 | TTGCTAGTTCCACCATCACA | SEQ ID NO:426 | −13.6 | −25.8 | 73.8 | −12.2 | 0 | −4.1 |
| 1956 | ACCACAGGCCGCCCCTGCCG | SEQ ID NO:427 | −13.6 | −36.9 | 87.5 | −20.5 | −2.8 | −8.7 |
| 2231 | TATTTTAAATCAAGGTTTTA | SEQ ID NO:428 | −13.6 | −15.1 | 50.5 | −1.4 | 0 | −4.5 |
| 2343 | ACAAATTACTGGGAAAATGT | SEQ ID NO:429 | −13.6 | −16.5 | 51.9 | −2.9 | 0 | −3.2 |
| 2937 | GATGAAAACACAAAGTAGTA | SEQ ID NO:430 | −13.6 | −15.3 | 49.9 | −1.7 | 0 | −3 |
| 540 | TCAGATTCGAAGTCATAGCC | SEQ ID NO:431 | −13.5 | −22.7 | 66.9 | −8.7 | −0.1 | −7.6 |
| 634 | AACTCTCTCCACCAAGGTAG | SEQ ID NO:432 | −13.5 | −24.4 | 70.3 | −10.4 | −0.2 | −5.1 |
| 721 | AGGGCTACCTCGCCTTGTGC | SEQ ID NO:433 | −13.5 | −30.9 | 84.1 | −15.4 | −2 | −7.3 |
| 819 | GAGAGATTGCAGCTTCCTTT | SEQ ID NO:434 | −13.5 | −24.7 | 72.7 | −11.2 | 0 | −5.3 |
| 1055 | TCATGATCTGCTGGAGTTCC | SEQ ID NO:435 | −13.5 | −25.2 | 74.4 | −11.7 | 0 | −6.9 |
| 1076 | TAAATGAACTGAAGTTGCCC | SEQ ID NO:436 | −13.5 | −20.3 | 59.3 | −6.8 | 0 | −5.7 |
| 1150 | ATAGTCATCAAAGTTGACTC | SEQ ID NO:437 | −13.5 | −19.1 | 60.3 | −3.4 | −2.2 | −7 |
| 2009 | TGATCGTTCTTTTTGTGTTC | SEQ ID NO:438 | −13.5 | −21.7 | 67.2 | −8.2 | 0 | −5.3 |
| 2065 | CTGTAAAGGGATCACGCTGA | SEQ ID NO:439 | −13.5 | −22.8 | 65.4 | −8.6 | −0.4 | −6.4 |
| 175 | GATTAGGGTCTCCAGGATTT | SEQ ID NO:440 | −13.4 | −24.4 | 72.5 | −10.4 | −0.3 | −5 |
| 206 | ATCCTCTGTACTCCAGTCTC | SEQ ID NO:441 | −13.4 | −26.6 | 79.7 | −12.7 | −0.2 | −4.8 |
| 311 | CCAGTGCCTTAACTTTTCCT | SEQ ID NO:442 | −13.4 | −26.4 | 74 | −13 | 0 | −3.6 |
| 391 | CCAACGGGTATGAGCTATTC | SEQ ID NO:443 | −13.4 | −23.8 | 67.8 | −10.4 | 0 | −5.2 |
| 407 | GTTCTCCATGTGTTGCCCAA | SEQ ID NO:444 | −13.4 | −28 | 78.3 | −14.6 | 0 | −4.3 |
| 552 | TCTGTGTCTGTTTCAGATTC | SEQ ID NO:445 | −13.4 | −22.6 | 71.5 | −7.7 | −1.4 | −6.3 |
| 603 | TCTTGACTTTCCCGATTGTC | SEQ ID NO:446 | −13.4 | −24.8 | 71.5 | −11.4 | 0 | −3.9 |
| 820 | AGAGAGATTGCAGCTTCCTT | SEQ ID NO:447 | −13.4 | −24.6 | 72.6 | −11.2 | 0 | −5.3 |
| 1014 | CGTCCGGGGTGATCTCCTGC | SEQ ID NO:448 | −13.4 | −31 | 83.1 | −17 | −0.3 | −6.6 |
| 1303 | TAGTTCCACCATCACAGGCA | SEQ ID NO:449 | −13.4 | −26.7 | 75.6 | −13.3 | 0 | −4 |
| 1322 | TGTCCAGGAAGTCACTTGCT | SEQ ID NO:450 | −13.4 | −25.6 | 74.6 | −12.2 | 0 | −5.5 |
| 1769 | CCCCTTCAAGACAAGTAGCA | SEQ ID NO:451 | −13.4 | −25.6 | 71 | −12.2 | 0 | −4.1 |
| 1905 | TTGGCATAAGTGTGATCTCT | SEQ ID NO:452 | −13.4 | −22.4 | 67.8 | −9 | 0 | −6.5 |
| 1957 | TACCACAGGCCGCCCCTGCC | SEQ ID NO:453 | −13.4 | −35.8 | 87.7 | −20.5 | −1.9 | −7.8 |
| 2512 | GGTCTGAATGAAGTATGGTG | SEQ ID NO:454 | −13.4 | −20.8 | 63.3 | −7.4 | 0 | −3 |
| 3061 | ATCAATATTAATTTAATAGC | SEQ ID NO:455 | −13.4 | −13.9 | 47.7 | −0.2 | 0.1 | −6.6 |
| 101 | TGCCGGAGACACGGCCCGCG | SEQ ID NO:456 | −13.3 | −33.3 | 79.8 | −15.9 | −4.1 | −14.4 |
| 335 | CTTGTTGCTTGTGAACTTCT | SEQ ID NO:457 | −13.3 | −22.7 | 68.3 | −8.9 | −0.1 | −4.9 |
| 454 | TTCATTATTTTTATCAGAGC | SEQ ID NO:458 | −13.3 | −18.6 | 59.6 | −5.3 | 0 | −2.8 |
| 971 | AAAGACGTCCATCCACTACT | SEQ ID NO:459 | −13.3 | −23.5 | 66.2 | −9.6 | 0 | −8.6 |
| 2218 | GGTTTTAAATACAAAAGGTG | SEQ ID NO:460 | −13.3 | −15.9 | 51.3 | −2.6 | 0 | −5.4 |
| 2219 | AGGTTTTAAATACAAAAGGT | SEQ ID NO:461 | −13.3 | −15.9 | 51.4 | −2.6 | 0 | −5.4 |
| 2525 | CTACTCTTTCACTGGTCTGA | SEQ ID NO:462 | −13.3 | −23.7 | 71.7 | −10.4 | 0 | −2.8 |
| 2560 | ACTGCCACTGGCTTTAGATA | SEQ ID NO:463 | −13.3 | −24.8 | 71.5 | −9.4 | −2.1 | −9.7 |
| 2666 | TTTTACAGTTTGATTTAAAA | SEQ ID NO:464 | −13.3 | −14.7 | 49.5 | −1.3 | 0 | −5.2 |
| 168 | GTCTCCAGGATTTCTCGTCT | SEQ ID NO:465 | −13.2 | −26.6 | 78.6 | −12.9 | −0.1 | −5 |
| 415 | AGGACTGGGTTCTCCATGTG | SEQ ID NO:466 | −13.2 | −26.2 | 76.4 | −11.7 | −1.2 | −6.1 |
| 635 | TAACTCTCTCCACCAAGGTA | SEQ ID NO:467 | −13.2 | −24.1 | 69.5 | −10.4 | −0.2 | −5.1 |
| 1011 | CCGGGGTGATCTCCTGCAGT | SEQ ID NO:468 | −13.2 | −30.5 | 83.2 | −16.3 | −0.8 | −8.9 |
| 1065 | AAGTTGCCCTTCATGATCTG | SEQ ID NO:469 | −13.2 | −24.4 | 70.3 | −11.2 | 0 | −6.4 |
| 1089 | ATTTCCTTCTGCATAAATGA | SEQ ID NO:470 | −13.2 | −20.3 | 61 | −7.1 | 0 | −4.9 |
| 1746 | TGATAGCCTCGTCCCATTAT | SEQ ID NO:471 | −13.2 | −26.3 | 73.1 | −13.1 | 0 | −3.1 |
| 1747 | ATGATAGCCTCGTCCCATTA | SEQ ID NO:472 | −13.2 | −26.3 | 73.1 | −13.1 | 0 | −3.2 |
| 1798 | CATATAAGTAATTTCTTTGA | SEQ ID NO:473 | −13.2 | −15.9 | 52.3 | −2.7 | 0.1 | −3.1 |
| 2310 | ACAAAAATCACATATTGAGT | SEQ ID NO:474 | −13.2 | −15.7 | 50.8 | −1.9 | −0.3 | −4.5 |
| 2566 | GCATACACTGCCACTGGCTT | SEQ ID NO:475 | −13.2 | −27.8 | 77.1 | −12.5 | −2.1 | −9.7 |
| 2670 | TAAGTTTTACAGTTTGATTT | SEQ ID NO:476 | −13.2 | −17.3 | 56.2 | −4.1 | 0 | −2.6 |
| 2857 | AGCAGCTTGAATTTAAAGTT | SEQ ID NO:477 | −13.2 | −19 | 58.7 | −5.8 | 0 | −5.6 |
| 2922 | TAGTAGGATACCCAACATGT | SEQ ID NO:478 | −13.2 | −22.4 | 65.4 | −8.3 | −0.8 | −7.9 |
| 164 | CCAGGATTTCTCGTCTCGTT | SEQ ID NO:479 | −13.1 | −26.2 | 74.8 | −12.6 | −0.1 | −3.5 |
| 179 | CTTTGATTAGGGTCTCCAGG | SEQ ID NO:480 | −13.1 | −24.7 | 73 | −10.4 | −1.1 | −4.4 |
| 208 | ATATCCTCTGTACTCCAGTC | SEQ ID NO:481 | −13.1 | −25 | 74.9 | −11 − | 0.8 | −4.8 |
| 868 | CACTGCTTTTTCTTCCACCG | SEQ ID NO:482 | −13.1 | −26.4 | 73.4 | −13.3 | 0 | −3.6 |
| 1199 | ATCTCTGGATCTCCTTTATG | SEQ ID NO:483 | −13.1 | −22.9 | 69.2 | −9.8 | 0 | −5.3 |
| 1451 | CTGTGTTTGTGATCCCCACA | SEQ ID NO:484 | −13.1 | −27.3 | 76.5 | −12.3 | −1.9 | −6.3 |
| 1536 | TAAGCCTTTGTACTGGCCAC | SEQ ID NO:485 | −13.1 | −25.8 | 72.8 | −10.8 | −1.9 | −8.4 |
| 1581 | CACATCATAAGGGCAAACAT | SEQ ID NO:486 | −13.1 | −20.1 | 59.2 | −7 | 0 | −4 |
| 1768 | CCCTTCAAGACAAGTAGCAT | SEQ ID NO:487 | −13.1 | −23.6 | 67.5 | −10.5 | 0 | −4.1 |
| 2342 | CAAATTACTGGGAAAATGTA | SEQ ID NO:488 | −13.1 | −16 | 50.9 | −2.9 | 0 | −3.2 |
| 163 | CAGGATTTCTCGTCTCGTTC | SEQ ID NO:489 | −13 | −24.6 | 72.8 | −11.1 | −0.1 | −3.5 |
| 495 | TCTTTGTAGTTGGTGATGAT | SEQ ID NO:490 | −13 | −21.3 | 66.2 | −8.3 | 0 | −2 |
| 598 | ACTTTCCCGATTGTCATACA | SEQ ID NO:491 | −13 | −24.1 | 68.7 | −11.1 | 0 | −4.4 |
| 602 | CTTGACTTTCCCGATTGTCA | SEQ ID NO:492 | −13 | −25.1 | 71 | −11 | −1 | −5.3 |
| 972 | GAAAGACGTCCATCCACTAC | SEQ ID NO:493 | −13 | −23.2 | 65.6 | −9.6 | 0 | −8.6 |
| 1013 | GTCCGGGGTGATCTCCTGCA | SEQ ID NO:494 | −13 | −30.9 | 84.7 | −17 | −0.8 | −6.6 |
| 1151 | TATAGTCATCAAAGTTGACT | SEQ ID NO:495 | −13 | −18.4 | 58.2 | −3.4 | −2 | −6.6 |
| 1330 | TGTGTTTCTGTCCAGGAAGT | SEQ ID NO:496 | −13 | −24.5 | 73.6 | −11.5 | 0.2 | −5.5 |
| 1522 | GGCCACACCAATCTCAGGAC | SEQ ID NO:497 | −13 | −27.2 | 75 | −13.5 | −0.4 | −7 |
| 1907 | ACTTGGCATAAGTGTGATCT | SEQ ID NO:498 | −13 | −22.2 | 66.8 | −8.2 | −0.9 | −6.9 |
| 1975 | ATCCTCCTTATCACAAATTA | SEQ ID NO:499 | −13 | −20.8 | 61.8 | −7.8 | 0 | −3.2 |
| 2004 | GTTCTTTTTGTGTTCTTAAT | SEQ ID NO:500 | −13 | −19.9 | 63.4 | −6.9 | 0 | −2.3 |
| 2068 | CAACTGTAAAGGGATCACGC | SEQ ID NO:501 | −13 | −21.5 | 62 | −7.1 | −1.3 | −6.6 |
| 2069 | GCAACTGTAAAGGGATCACG | SEQ ID NO:502 | −13 | −21.5 | 62 | −7.1 | −1.3 | −6.6 |
| 2194 | GTGTTGCTTAATCATACAGT | SEQ ID NO:503 | −13 | −21.2 | 65.2 | −8.2 | 0 | −1.3 |
| 2309 | CAAAAATCACATATTGAGTG | SEQ ID NO:504 | −13 | −15.5 | 50.3 | −1.9 | −0.3 | −4.5 |
| 2555 | CACTGGCTTTAGATACTCCA | SEQ ID NO:505 | −13 | −24.1 | 70.1 | −11.1 | 0 | −3.3 |
| 2936 | ATGAAAACACAAAGTAGTAG | SEQ ID NO:506 | −13 | −14.7 | 48.8 | −1.7 | 0 | −3 |
| 23 | TCTGCGGGCTCGGGGGCCGG | SEQ ID NO:507 | −12.9 | −34.8 | 87.7 | −18.3 | −3.6 | −11.8 |
| 25 | AATCTGCGGGCTCGGGGGCC | SEQ ID NO:508 | −12.9 | −32.1 | 83.4 | −16.7 | −2.5 | −11.4 |
| 154 | TCGTCTCGTTCGAGGAACAT | SEQ ID NO:509 | −12.9 | −24 | 68.1 | −9.2 | −1.9 | −9.1 |
| 181 | GCCTTTGATTAGGGTCTCCA | SEQ ID NO:510 | −12.9 | −27.3 | 78.3 | −13.2 | −1.1 | −4.7 |
| 239 | TGCCTCCATCAAATCCCACA | SEQ ID NO:511 | −12.9 | −27.5 | 73.3 | −14.6 | 0 | −3 |
| 373 | TCCAAGGTGTACATCAAATT | SEQ ID NO:512 | −12.9 | −20.4 | 61 | −7.5 | 0 | −7.1 |
| 379 | AGCTATTCCAAGGTGTACAT | SEQ ID NO:513 | −12.9 | −23.1 | 68.4 | −10.2 | 0 | −6.6 |
| 392 | CCCAACGGGTATGAGCTATT | SEQ ID NO:515 | −12.9 | −25.4 | 69.8 | −11.8 | −0.5 | −6.1 |
| 869 | CCACTGCTTTTTCTTCCACC | SEQ ID NO:515 | −12.9 | −27.6 | 77.1 | −14.7 | 0 | −2.9 |
| 1095 | TCAAATATTTCCTTCTGCAT | SEQ ID NO:516 | −12.9 | −20.8 | 62.4 | −7.9 | 0 | −6 |
| 1525 | ACTGGCCACACCAATCTCAG | SEQ ID NO:517 | −12.9 | −26.3 | 72.9 | −12.1 | −1.2 | −8.4 |
| 1537 | ATAAGCCTTTGTACTGGCCA | SEQ ID NO:518 | −12.9 | −25.6 | 72.2 | −10.8 | −1.9 | −8.3 |
| 1595 | AGATCCGATCATCACACATC | SEQ ID NO:519 | −12.9 | −22.8 | 66.4 | −9 | −0.7 | −7.5 |
| 1745 | GATAGCCTCGTCCCATTATC | SEQ ID NO:520 | −12.9 | −26.7 | 74.9 | −13.8 | 0 | −3.2 |
| 2196 | TTGTGTTGCTTAATCATACA | SEQ ID NO:521 | −12.9 | −20.1 | 61.9 | −7.2 | 0 | −1.2 |
| 166 | CTCCAGGATTTCTCGTCTCG | SEQ ID NO:522 | −12.8 | −26.2 | 74.7 | −12.9 | −0.1 | −5 |
| 169 | GGTCTCCAGGATTTCTCGTC | SEQ ID NO:523 | −12.8 | −26.9 | 79.3 | −13.6 | −0.1 | −5 |
| 178 | TTTGATTAGGGTCTCCAGGA | SEQ ID NO:524 | −12.8 | −24.4 | 72.4 | −10.4 | −1.1 | −5.3 |
| 315 | TCATCCAGTGCCTTAACTTT | SEQ ID NO:525 | −12.8 | −24.5 | 70.9 | −11.7 | 0 | −3.1 |
| 478 | GATTCCATTGTGAATAACGA | SEQ ID NO:526 | −12.8 | −19.6 | 58.2 | −6.1 | −0.5 | −6.1 |
| 550 | TGTGTCTGTTTCAGATTCGA | SEQ ID NO:527 | −12.8 | −22.7 | 69 | −8.1 | −1.4 | −11.3 |
| 626 | CCACCAAGGTAGTAAAGCTG | SEQ ID NO:528 | −12.8 | −23.2 | 66.1 | −10.4 | 0 | −5.1 |
| 630 | CTCTCCACCAAGGTAGTAAA | SEQ ID NO:529 | −12.8 | −23.1 | 66.7 | −9.8 | −0.2 | −5.1 |
| 718 | GCTACCTCGCCTTGTGCCAA | SEQ ID NO:530 | −12.8 | −30.5 | 80.5 | −17.1 | −0.3 | −4.4 |
| 919 | GCGATTGGTGTGTTCTATGA | SEQ ID NO:531 | −12.8 | −23.8 | 70.2 | −11 | 0 | −3.4 |
| 1748 | AATGATAGCCTCGTCCCATT | SEQ ID NO:532 | −12.8 | −25.9 | 71.3 | −13.1 | 0 | 3.3 |
| 1896 | GTGTGATCTCTCATGATGAT | SEQ ID NO:533 | −12.8 | −21.9 | 67.2 | −8.4 | −0.4 | −6.9 |
| 1897 | AGTGTGATCTCTCATGATGA | SEQ ID NO:534 | −12.8 | −21.9 | 67.5 | −8.4 | −0.4 | −6.2 |
| 2217 | GTTTTAAATACAAAAGGTGT | SEQ ID NO:535 | −12.8 | −15.9 | 51.5 | 2.6 | −0.2 | 5.8 |
| 2230 | ATTTTAAATCAAGGTTTTAA | SEQ ID NO:536 | −12.8 | −14.7 | 49.4 | −1.4 | 0.1 | 4.5 |
| 2516 | CACTGGTCTGAATGAAGTAT | SEQ ID NO:537 | −12.8 | −20.2 | 61.4 | −7.4 | 0 | −3 |
| 2569 | TGAGCATACACTGCCACTGG | SEQ ID NO:538 | −12.8 | −25.6 | 72.1 | −11.1 | −1.7 | −5.1 |
| 2577 | TCCAAGTATGAGCATACACT | SEQ ID NO:539 | −12.8 | −22.1 | 65.3 | −8.4 | −0.6 | −8.8 |
| 2927 | CAAAGTAGTAGGATACCCAA | SEQ ID NO:540 | −12.8 | −20.8 | 61.1 | −6.9 | −1 | −4.1 |
| 2931 | AACACAAAGTAGTAGGATAC | SEQ ID NO:541 | −12.8 | −17.2 | 54.7 | −3.7 | −0.4 | −3.6 |
| 176 | TGATTAGGGTCTCCAGGATT | SEQ ID NO:542 | −12.7 | −24.3 | 72 | −10.4 | −1.1 | 5.4 |
| 177 | TTGATTAGGGTCTCCAGGAT | SEQ ID NO:543 | −12.7 | −24.3 | 72 | −10.4 | −1.1 | −5.4 |
| 210 | TCATATCCTCTGTACTCCAG | SEQ ID NO:544 | −12.7 | −24.5 | 72.5 | −11.1 | −0.5 | −4.8 |
| 240 | TTGCCTCCATCAAATCCCAC | SEQ ID NO:545 | −12.7 | −26.9 | 72.7 | −14.2 | 0 | −3 |
| 380 | GAGCTATTCCAAGGTGTACA | SEQ ID NO:546 | −12.7 | −23.7 | 69.8 | −11 | 0 | −6.4 |
| 429 | GGGTGGCTATTGACAGGACT | SEQ ID NO:547 | −12.7 | −25.7 | 74.4 | −13 | 0 | −3 |
| 482 | TGATGATTCCATTGTGAATA | SEQ ID NO:548 | −12.7 | −19.3 | 58.9 | −5.9 | −0.5 | −5.5 |
| 528 | TCATAGCCTTTGCTTTCCAA | SEQ ID NO:549 | −12.7 | −25 | 71.6 | −10.9 | −1.3 | −4.3 |
| 627 | TCCACCAAGGTAGTAAAGCT | SEQ ID NO:550 | −12.7 | −23.6 | 67.7 | −10.4 | −0.2 | −5.2 |
| 632 | CTCTCTCCACCAAGGTAGTA | SEQ ID NO:551 | −12.7 | −25.8 | 75 | −12.6 | 0.2 | −5.1 |
| 1009 | GGGGTGATCTCCTGCAGTTC | SEQ ID NO:552 | −12.7 | −28.2 | 82.6 | −14.7 | −0.3 | −8.9 |
| 1086 | TCCTTCTGCATAAATGAACT | SEQ ID NO:553 | −12.7 | −20.S | 60.8 | −7.8 | 0 | −4.9 |
| 1877 | TCATGATCACAGGCATCAAT | SEQ ID NO:554 | −12.7 | −21.8 | 64.7 | −8.4 | −0.4 | −6.8 |
| 1878 | ATCATGATCACAGGCATCAA | SEQ ID NO:555 | −12.7 | −21.8 | 64.7 | −8.4 | −0.4 | −7.7 |
| 1879 | GATCATGATCACAGGCATCA | SEQ ID NO:556 | −12.7 | −23.1 | 68.3 | −8.4 | 0.1 | −12.1 |
| 2197 | CTTGTGTTGCTTAATCATAC | SEQ ID NO:557 | −12.7 | −20.3 | 62.7 | −7.6 | 0 | −3.6 |
| 2592 | ACCCTTCCCTAACTGTCCAA | SEQ ID NO:558 | −12.7 | −28.2 | 75.2 | −15.5 | 0 | −3.2 |
| 5 | GGGTGGCGCCGACACGACT | SEQ ID NO:559 | −12.6 | −31.4 | 79.8 | −16.7 | −1.6 | −12.1 |
| 30 | TGGGCAATCTGCGGGCTCGG | SEQ ID NO:560 | −12.6 | −29.6 | 78.5 | −14.8 | −2.2 | −8.4 |
| 493 | TTTGTAGTTGGTGATGATTC | SEQ ID NO:561 | −12.6 | −20.5 | 64.5 | −7.9 | 0 | −1.8 |
| 604 | ATCTTGACTTTCCCGATTGT | SEQ ID NO:562 | −12.6 | −24.4 | 69.8 | −11.8 | 0 | −2.8 |
| 636 | ATAACTCTCTCCACCAAGGT | SEQ ID NO:563 | −12.6 | −24.4 | 70 | −11.3 | −0.2 | −4.7 |
| 1062 | TTGCCCTTCATGATCTGCTG | SEQ ID NO:564 | −12.6 | −26.6 | 75.2 | −14 | 0 | −6.8 |
| 1087 | TTCCTTCTGCATAAATGAAC | SEQ ID NO:565 | −12.6 | −19.7 | 59.3 | −7.1 | 0 | −4.9 |
| 2214 | TTAAATACAAAAGGTGTCTT | SEQ ID NO:566 | −12.6 | −15.9 | 51.5 | −2.6 | −0.4 | −3.3 |
| 2215 | TTTAAATACAAAAGGTGTCT | SEQ ID NO:567 | −12.6 | −15.9 | 51.5 | −2.6 | −0.4 | −6.4 |
| 2557 | GCCACTGGCTTTAGATACTC | SEQ ID NO:568 | −12.6 | −25.2 | 73.3 | −11.1 | −1.4 | −8.9 |
| 83 | CGAGGCCAGGGGCGAGTGGC | SEQ ID NO:569 | −12.5 | −32.1 | 84.3 | −17.1 | −2.5 | −8.9 |
| 102 | ATGCCGGAGACACGGCCCGC | SEQ ID NO:570 | −12.5 | −32.5 | 80.2 | −15.9 | −4.1 | −11.2 |
| 388 | ACGGGTATGAGCTATTCCAA | SEQ ID NO:571 | −12.5 | −23.8 | 67.8 | −10.8 | −0.1 | −5.2 |
| 434 | GCTGGGGGTGGCTATTGACA | SEQ ID NO:572 | −12.5 | −27.9 | 79 | −15.4 | 0 | −3.7 |
| 543 | GTTTCAGATTCGAAGTCATA | SEQ ID NO:573 | −12.5 | −20.3 | 62.5 | −7.3 | −0.1 | −7.6 |
| 863 | CTTTTTCTTCCACCGGGAAA | SEQ ID NO:574 | −12.5 | −24.4 | 67.8 | −9.9 | −2 | −7.1 |
| 1010 | CGGGGTGATCTCCTGCAGTT | SEQ ID NO:575 | −12.5 | −28.6 | 80.1 | −15.1 | −0.8 | −8.9 |
| 1039 | TTCCATCTGGAGTGTTTGCA | SEQ ID NO:576 | −12.5 | −25.4 | 74.8 | −11.5 | −0.2 | −10.7 |
| 1088 | TTTCCTTCTGCATAAATGAA | SEQ ID NO:577 | −12.5 | −19.6 | 59.1 | −7.1 | 0 | −4.9 |
| 1096 | CTCAAATATTTCCTTCTGCA | SEQ ID NO:578 | −12.5 | −21.7 | 64.3 | −9.2 | 0 | −6 |
| 1296 | ACCATCACAGGCAACTCAGT | SEQ ID NO:579 | −12.5 | −25.3 | 72.3 | −11.9 | −0.8 | −4.5 |
| 1331 | GTGTGTTTCTGTCCAGGAAG | SEQ ID NO:580 | −12.5 | −24.5 | 73.6 | −11.5 | −0.1 | −5.5 |
| 1531 | CTTTGTACTGGCCACACCAA | SEQ ID NO:581 | −12.5 | −25.9 | 71.7 | −12.1 | −1.2 | −8.4 |
| 1974 | TCCTCCTTATCACAAATTAC | SEQ ID NO:582 | −12.5 | −21 | 62.3 | −8.5 | 0 | −3.2 |
| 2213 | TAAATACAAAAGGTGTCTTG | SEQ ID NO:583 | −12.5 | −15.8 | 51.2 | −2.6 | −0.4 | −4.8 |
| 2578 | GTCCAAGTATGAGCATACAC | SEQ ID NO:584 | −12.5 | −22.4 | 66.6 | −8.4 | −1.4 | −9.6 |
| 2665 | TTTACAGTTTGATTTAAAAA | SEQ ID NO:585 | −12.5 | −13.9 | 47.6 | −1.3 | 0 | −5.2 |
| 3060 | TCAATATTAATTTAATAGCA | SEQ ID NO:586 | −12.5 | −14.6 | 49 | −1.4 | −0.4 | −7.1 |
| 7 | CCGGGGTGGCGCCGACACGA | SEQ ID NO:587 | −12.4 | −33.1 | 80.2 | −18.3 | −1.7 | −12.8 |
| 165 | TCCAGGATTTCTCGTCTCGT | SEQ ID NO:588 | −12.4 | −26.5 | 76.2 | −14.1 | 0.3 | −4.7 |
| 167 | TCTCCAGGATTTCTCGTCTC | SEQ ID NO:589 | −12.4 | −25.8 | 76.7 | −12.9 | −0.1 | −5 |
| 318 | TCTTCATCCAGTGCCTTAAC | SEQ ID NO:590 | −12.4 | −24.8 | 72.1 | −12.4 | 0 | −3.6 |
| 537 | GATTCGAAGTCATAGCCTTT | SEQ ID NO:591 | −12.4 | −22.7 | 66.6 | −10.3 | 0 | −7.1 |
| 1324 | TCTGTCCAGGAAGTCACTTG | SEQ ID NO:592 | −12.4 | −24.2 | 71.8 | −11.3 | 0 | 7.5 |
| 1876 | CATGATCACAGGCATCAATT | SEQ ID NO:593 | −12.4 | −21.5 | 63.6 | −8.4 | −0.4 | −6.8 |
| 2007 | ATCGTTCTTTTTGTGTTCTT | SEQ ID NO:594 | −12.4 | −22.1 | 68.4 | −9.7 | 0 | −3 |
| 2925 | AAGTAGTAGGATACCCAACA | SEQ ID NO:595 | −12.4 | −21.7 | 63.6 | −8.6 | −0.4 | −3.7 |
| 171 | AGGGTCTCCAGGATTTCTCG | SEQ ID NO:596 | −12.3 | −26.5 | 76.8 | −12.9 | −1.2 | 5.5 |
| 215 | CAGAATCATATCCTCTGTAC | SEQ ID NO:597 | −12.3 | −21.1 | 64 | −8.1 | −0.4 | −3.8 |
| 312 | TCCAGTGCCTTAACTTTTCC | SEQ ID NO:598 | −12.3 | −25.9 | 73.8 | −13.6 | 0 | −3.6 |
| 477 | ATTCCATTGTGAATAACGAT | SEQ ID NO:599 | −12.3 | −19 | 57 | −6.1 | −0.3 | −5.2 |
| 805 | TCCTTTCTTGTCTTTGCCTG | SEQ ID NO:600 | −12.3 | −26.3 | 77 | −14 | 0 | −3 |
| 864 | GCTTTTTCTTCCACCGGGAA | SEQ ID NO:601 | −12.3 | −26.9 | 74 | −12.8 | −1.8 | −7.1 |
| 970 | AAGACGTCCATCCACTACTG | SEQ ID NO:602 | −12.3 | −24.2 | 68.1 | −11.3 | 0 | −8.6 |
| 1204 | CCGGCATCTCTGGATCTCCT | SEQ ID NO:603 | −12.3 | −29.5 | 80.9 | −16.3 | −0.7 | −7 |
| 1302 | AGTTCCACCATCACAGGCAA | SEQ ID NO:604 | −12.3 | −26.3 | 73.8 | −14 | 0 | −4 |
| 1538 | TATAAGCCTTTGTACTGGCC | SEQ ID NO:605 | −12.3 | −24.6 | 70.6 | −11.1 | −1.1 | −7.4 |
| 2073 | GCCAGCAACTGTAAAGGGAT | SEQ ID NO:606 | −12.3 | −23.9 | 67.5 | −10.2 | −1.3 | −6.8 |
| 2074 | AGCCAGCAACTGTAAAGGGA | SEQ ID NO:607 | −12.3 | −23.9 | 67.7 | −10.2 | −1.3 | −6.9 |
| 2198 | TCTTGTGTTGCTTAATCATA | SEQ ID NO:608 | −12.3 | −20.5 | 63.6 | −8.2 | 0 | −3.6 |
| 2208 | ACAAAAGGTGTCTTGTGTTG | SEQ ID NO:609 | −12.3 | −20.3 | 62.1 | −6.1 | −1.9 | −6.1 |
| 2926 | AAAGTAGTAGGATACCCAAC | SEQ ID NO:610 | −12.3 | −20.3 | 60.4 | −6.9 | −1 | −4.2 |
| 309 | AGTGCCTTAACTTTTCCTTT | SEQ ID NO:611 | −12.2 | −23.9 | 70 | −11.7 | 0 | −3 |
| 378 | GCTATTCCAAGGTGTACATC | SEQ ID NO:612 | −12.2 | −23.5 | 69.8 | −11.3 | 0 | −6.8 |
| 430 | GGGGTGGCTATTGACAGGAC | SEQ ID NO:613 | −12.2 | −26 | 75 | −13.8 | 0 | −3.7 |
| 922 | GACGCGATTGGTGTGTTCTA | SEQ ID NO:615 | −12.2 | −24.8 | 71 | −11.7 | −0.8 | −7.9 |
| 1090 | TATTTCCTTCTGCATAAATG | SEQ ID NO:615 | −12.2 | −19.4 | 59.2 | −7.2 | 0 | −4.9 |
| 1092 | AATATTTCCTTCTGCATAAA | SEQ ID NO:616 | −12.2 | −18.7 | 57.3 | −6.5 | 0 | −4.9 |
| 1094 | CAAATATTTCCTTCTGCATA | SEQ ID NO:617 | −12.2 | −20.1 | 60.5 | −7.9 | 0 | −6 |
| 1898 | AAGTGTGATCTCTCATGATG | SEQ ID NO:618 | −12.2 | −20.6 | 63.7 | −8.4 | 0.1 | −6.2 |
| 2529 | TGCACTACTCTTTCACTGGT | SEQ ID NO:619 | −12.2 | −24.5 | 72.9 | −12.3 | 0 | −4.7 |
| 2671 | TTAAGTTTTACAGTTTGATT | SEQ ID NO:620 | −12.2 | −17.3 | 56.2 | −5.1 | 0 | −2.6 |
| 221 | CACCAGCAGAATCATATCCT | SEQ ID NO:621 | −12.1 | −24.1 | 68.5 | −12 | 0 | −3.3 |
| 421 | ATTGACAGGACTGGGTTCTC | SEQ ID NO:622 | −12.1 | −23.9 | 71.6 | −11.8 | 0 | −4.9 |
| 818 | AGAGATTGCAGCTTCCTTTC | SEQ ID NO:623 | −12.1 | −24.5 | 73.1 | −12.4 | 0 | −5.2 |
| 822 | CGAGAGAGATTGCAGCTTCC | SEQ ID NO:624 | −12.1 | −25 | 71.6 | −12.9 | 0 | −5.3 |
| 1007 | GGTGATCTCCTGCAGTTCGT | SEQ ID NO:625 | −12.1 | −27.8 | 80.3 | −15.2 | 0 | −8.2 |
| 1198 | TCTCTGGATCTCCTTTATGT | SEQ ID NO:626 | −12.1 | −24.1 | 72.8 | −12 | 0 | −5 |
| 2349 | TCCTCCACAAATTACTGGGA | SEQ ID NO:627 | −12.1 | −23.8 | 67.2 | −11.1 | −0.3 | −5.9 |
| 2856 | GCAGCTTGAATTTAAAGTTT | SEQ ID NO:628 | −12.1 | −19.1 | 58.8 | −7 | 0 | −4.9 |
| 2921 | AGTAGGATACCCAACATGTA | SEQ ID NO:629 | −12.1 | −22.4 | 65.4 | −9.4 | −0.8 | −8.5 |
| 153 | CGTCTCGTTCGAGGAACATG | SEQ ID NO:630 | −12 | −23.6 | 66.5 | −9.7 | −1.9 | −9.1 |
| 310 | CAGTGCCTTAACTTTTCCTT | SEQ ID NO:631 | −12 | −24.5 | 70.8 | −12.5 | 0 | −3 |
| 476 | TTCCATTGTGAATAACGATA | SEQ ID NO:632 | −12 | −18.7 | 56.5 | −6.1 | −0.3 | −3.5 |
| 496 | GTCTTTGTAGTTGGTGATGA | SEQ ID NO:633 | −12 | −22.5 | 69.9 | −10.5 | 0 | −2.3 |
| 1017 | GCTCGTCCGGGGTGATCTCC | SEQ ID NO:634 | −12 | −31.4 | 85.2 | −19.4 | 0 | −6.6 |
| 1068 | CTGAAGTTGCCCTTCATGAT | SEQ ID NO:635 | −12 | −24.6 | 70.1 | −10 | −2.6 | −8.7 |
| 1200 | CATCTCTGGATCTCCTTTAT | SEQ ID NO:636 | −12 | −23.6 | 70.5 | −11.1 | −0.1 | −5.3 |
| 1450 | TGTGTTTGTGATCCCCACAG | SEQ ID NO:637 | −12 | −26.4 | 74.9 | −12.3 | −2.1 | −6.5 |
| 1645 | AGGCAGCCGTTTCAATCCAA | SEQ ID NO:638 | −12 | −26.5 | 72.5 | −13.7 | −0.3 | −9 |
| 1777 | TTTCAGTGCCCCTTCAAGAC | SEQ ID NO:639 | −12 | −26.5 | 74.8 | −14.5 | 0 | −3.8 |
| 1973 | CCTCCTTATCACAAATTACC | SEQ ID NO:640 | −12 | −22.6 | 64.5 | −10.6 | 0 | −3.2 |
| 1979 | CAGTATCCTCCTTATCACAA | SEQ ID NO:641 | −12 | −23.3 | 68.1 | −11.3 | 0 | −2.7 |
| 2851 | TTGAATTTAAAGTTTGTGCT | SEQ ID NO:642 | −12 | −17.8 | 56.2 | −5.8 | 0 | −4.8 |
| 2924 | AGTAGTAGGATACCCAACAT | SEQ ID NO:643 | −12 | −22.4 | 65.8 | −9.5 | −0.8 | −4.4 |
| 187 | CTGAAGGCCTTTGATTAGGG | SEQ ID NO:644 | −11.9 | −23.7 | 68.4 | −10.4 | −0.3 | −10.8 |
| 205 | TCCTCTGTACTCCAGTCTCT | SEQ ID NO:645 | −11.9 | −27.5 | 81.9 | −14.7 | −0.8 | −4.8 |
| 214 | AGAATCATATCCTCTGTACT | SEQ ID NO:646 | −11.9 | −21.3 | 64.8 | −9.4 | 0 | −4.8 |
| 249 | TCTTTATCATTGCCTCCATC | SEQ ID NO:647 | −11.9 | −24.6 | 72.2 | −12.7 | 0 | −3 |
| 1008 | GGGTGATCTCCTGCAGTTCG | SEQ ID NO:648 | −11.9 | −27.8 | 79.3 | −15.2 | −0.1 | −8.7 |
| 1190 | TCTCCTTTATGTGATCCTTC | SEQ ID NO:649 | −11.9 | −24.1 | 72.2 | −12.2 | 0 | −4.3 |
| 1455 | CCAACTGTGTTTGTGATCCC | SEQ ID NO:650 | −11.9 | −25.9 | 73 | −14 | 0 | −4.6 |
| 2195 | TGTGTTGCTTAATCATACAG | SEQ ID NO:651 | −11.9 | −20 | 61.8 | −8.1 | 0 | −1.3 |
| 2344 | CACAAATTACTGGGAAAATG | SEQ ID NO:652 | −11.9 | −16 | 50.6 | −4.1 | 0 | −3.2 |
| 2846 | TTTAAAGTTTGTGCTATAAA | SEQ ID NO:653 | −11.9 | −15.8 | 51.7 | −3.9 | 0 | −4.3 |
| 2858 | AAGCAGCTTGAATTTAAAGT | SEQ ID NO:654 | −11.9 | −18.2 | 56.4 | −5.8 | 0 | −7.5 |
| 95 | AGACACGGCCCGCGAGGCCA | SEQ ID NO:655 | −11.8 | −33.2 | 81.6 | −16.5 | −4.7 | −17.4 |
| 220 | ACCAGCAGAATCATATCCTC | SEQ ID NO:656 | −11.8 | −23.8 | 68.9 | −12 | 0 | −4.1 |
| 246 | TTATCATTGCCTCCATCAAA | SEQ ID NO:657 | −11.8 | −22.5 | 65 | −10.7 | 0 | −3.7 |
| 714 | CCTCGCCTTGTGCCAACTGC | SEQ ID NO:658 | −11.8 | −30.8 | 80.8 | −18.4 | −0.3 | −5.2 |
| 803 | CTTTCTTGTCTTTGCCTGTT | SEQ ID NO:659 | −11.8 | −25.2 | 75.4 | −13.4 | 0 | −3 |
| 1971 | TCCTTATCACAAATTACCAC | SEQ ID NO:660 | −11.8 | −20.6 | 60.8 | −8.8 | 0 | −3.2 |
| 2216 | TTTTAAATACAAAAGGTGTC | SEQ ID NO:661 | −11.8 | −15.1 | 50 | −2.6 | −0.4 | −6.8 |
| 2348 | CCTCCACAAATTACTGGGAA | SEQ ID NO:662 | −11.8 | −22.7 | 63.8 | −10.3 | −0.3 | −5.9 |
| 2 | GTGGCGCCGACACGACTCCC | SEQ ID NO:663 | −11.7 | −32.2 | 80.7 | −18.5 | −0.8 | −12.1 |
| 49 | GTGCACACACGAGCTTCGGT | SEQ ID NO:664 | −11.7 | −27.5 | 75.9 | −13.8 | −1.6 | −11.7 |
| 209 | CATATCCTCTGTACTCCAGT | SEQ ID NO:665 | −11.7 | −25.3 | 74.3 | −12.7 | −0.8 | −4.8 |
| 336 | TCTTGTTGCTTGTGAACTTC | SEQ ID NO:666 | −11.7 | −22.2 | 67.9 | −10 | −0.1 | −4.9 |
| 492 | TTGTAGTTGGTGATGATTCC | SEQ ID NO:667 | −11.7 | −22.4 | 68.2 | −10.7 | 0 | −2.6 |
| 1456 | GCCAACTGTGTTTGTGATCC | SEQ ID NO:668 | −11.7 | −25.7 | 73.7 | −14 | 0 | −4.9 |
| 1638 | CGTTTCAATCCAAGCATGAT | SEQ ID NO:669 | −11.7 | −22.1 | 63.5 | −10.4 | 0 | −4.8 |
| 1646 | CAGGCAGCCGTTTCAATCCA | SEQ ID NO:670 | −11.7 | −27.9 | 75.9 | −15.4 | −0.3 | −9 |
| 1807 | TTCAGAGTGCATATAAGTAA | SEQ ID NO:671 | −11.7 | −18.4 | 58.1 | −6.7 | 0 | −5.4 |
| 2459 | TCTCAGATTGAAGTGGAGGG | SEQ ID NO:672 | −11.7 | −22.4 | 67.5 | −10.7 | 0 | −4.3 |
| 977 | GGATAGAAAGACGTCCATCC | SEQ ID NO:673 | −11.6 | −23 | 65.4 | −10.7 | −0.3 | −8.6 |
| 1016 | CTCGTCCGGGGTGATCTCCT | SEQ ID NO:674 | −11.6 | −30.5 | 82.7 | −18 | −0.8 | −6 |
| 1639 | CCGTTTCAATCCAAGCATGA | SEQ ID NO:675 | −11.6 | −24.1 | 67 | −12.5 | 0 | −4.8 |
| 1721 | CTGACTTCTGATGATAAAGT | SEQ ID NO:676 | −11.6 | −18.7 | 58.1 | −6.4 | −0.5 | −4 |
| 1806 | TCAGAGTGCATATAAGTAAT | SEQ ID NO:677 | −11.6 | −18.3 | 57.8 | −6.7 | 0 | −5.9 |
| 1808 | CTTCAGAGTGCATATAAGTA | SEQ ID NO:678 | −11.6 | −20 | 62.3 | −8.4 | 0 | −5.4 |
| 2554 | ACTGGCTTTAGATACTCCAA | SEQ ID NO:679 | −11.6 | −22.7 | 66.7 | −11.1 | 0 | −3.7 |
| 2570 | ATGAGCATACACTGCCACTG | SEQ ID NO:680 | −11.6 | −24.4 | 69.5 | −11.1 | −1.7 | −5 |
| 2572 | GTATGAGCATACACTGCCAC | SEQ ID NO:681 | −11.6 | −24.4 | 70.4 | −11.1 | −1.7 | −8.9 |
| 2674 | GTTTTAAGTTTTACAGTTTG | SEQ ID NO:682 | −11.6 | −18 | 58.4 | −6.4 | 0 | −2.6 |
| 2675 | AGTTTTAAGTTTTACAGTTT | SEQ ID NO:683 | −11.6 | −18 | 58.7 | −6.4 | 0 | −2.6 |
| 2850 | TGAATTTAAAGTTTGTGCTA | SEQ ID NO:684 | −11.6 | −17.4 | 55.3 | −5.8 | 0 | −4.9 |
| 1 | TGGCGCCGACACGACTCCCT | SEQ ID NO:685 | −11.5 | −31.9 | 79.3 | −18.5 | −0.1 | −12 |
| 191 | GTCTCTGAAGGCCTTTGATT | SEQ ID NO:686 | −11.5 | −24.5 | 72 | −11.6 | 0 | −10.8 |
| 455 | ATTCATTATTTTTATCAGAG | SEQ ID NO:687 | −11.5 | −16.8 | 55.2 | −5.3 | 0 | −2.8 |
| 874 | ATACTCCACTGCTTTTTCTT | SEQ ID NO:688 | −11.5 | −23.5 | 70 | −12 | 0 | −3.6 |
| 1872 | ATCACAGGCATCAATTTATC | SEQ ID NO:689 | −11.5 | −20.4 | 62.3 | −8.9 | 0 | −4 |
| 2567 | AGCATACACTGCCACTGGCT | SEQ ID NO:690 | −11.5 | −27.7 | 77.1 | −14.1 | −2.1 | −9.7 |
| 2842 | AAGTTTGTGCTATAAAATTG | SEQ ID NO:691 | −11.5 | −16 | 51.9 | −4.5 | 0 | −3.8 |
| 152 | GTCTCGTTCGAGGAACATGG | SEQ ID NO:692 | −11.4 | −24 | 68.9 | −11.1 | −1.4 | −9.1 |
| 241 | ATTGCCTCCATCAAATCCCA | SEQ ID NO:693 | −11.4 | −26.7 | 72.1 | −15.3 | 0 | −3.7 |
| 393 | GCCCAACGGGTATGAGCTAT | SEQ ID NO:694 | −11.4 | −27.1 | 73.4 | −14.4 | −1.2 | −8 |
| 400 | ATGTGTTGCCCAACGGGTAT | SEQ ID NO:695 | −11.4 | −26.6 | 73 | −13.9 | −1.2 | −7.7 |
| 425 | GGCTATTGACAGGACTGGGT | SEQ ID NO:696 | −11.4 | −25.7 | 74.4 | −14.3 | 0 | −5.8 |
| 559 | AATTGTCTCTGTGTCTGTTT | SEQ ID NO:697 | −11.4 | −22.3 | 69.7 | −10.9 | 0 | −2.3 |
| 808 | GCTTCCTTTCTTGTCTTTGC | SEQ ID NO:698 | −11.4 | −26.2 | 78.5 | −14.8 | 0 | −2.8 |
| 15452 | ACTGTGTTTGTGATCCCCAC | SEQ ID NO:699 | −11.4 | −26.8 | 76 | −14.5 | −0.8 | −4.3 |
| 1643 | GCAGCCGTTTCAATCCAAGC | SEQ ID NO:700 | −11.4 | −27.1 | 74.2 | −15.7 | 0 | −3.5 |
| 1880 | TGATCATGATCACAGGCATC | SEQ ID NO:701 | −11.4 | −22.4 | 66.9 | −8.4 | −0.6 | −13.4 |
| 1996 | TGTGTTCTTAATGGTCTCAG | SEQ ID NO:702 | −11.4 | −21.7 | 67.4 | −10.3 | 0 | −2.4 |
| 2070 | AGCAACTGTAAAGGGATCAC | SEQ ID NO:703 | −11.4 | −20.7 | 61.8 | −8.6 | −0.4 | −6.4 |
| 2404 | ATAATAGCTAGAATCTTTCT | SEQ ID NO:704 | −11.4 | −17.8 | 56.9 | −5.7 | −0.5 | −6.8 |
| 2471 | AACATATTGTCTTCTCAGAT | SEQ ID NO:705 | −11.4 | −19.6 | 61.4 | −7.7 | −0.2 | −3.1 |
| 2487 | AGTACCAATTTTTAGAAACA | SEQ ID NO:706 | −11.4 | −17.3 | 54.3 | −5.9 | 0 | −4.4 |
| 2553 | CTGGCTTTAGATACTCCAAT | SEQ ID NO:707 | −11.4 | −22.5 | 66.1 | −11.1 | 0 | −3.7 |
| 2571 | TATGAGCATACACTGCCACT | SEQ ID NO:708 | −11.4 | −24.1 | 69.1 | −11.1 | −1.6 | −6.3 |
| 2843 | AAAGTTTGTGCTATAAAATT | SEQ ID NO:709 | −11.4 | −15.3 | 50.3 | −3.9 | 0 | −4.1 |
| 308 | GTGCCTTAACTTTTCCTTTC | SEQ ID NO:710 | −11.3 | −24.3 | 71.4 | −13 | 0 | −3 |
| 440 | CAGAGCGCTGGGGGTGGCTA | SEQ ID NO:711 | −11.3 | −30.2 | 82.9 | −17.9 | −0.8 | −9.4 |
| 610 | GCTGGTATCTTGACTTTCCC | SEQ ID NO:712 | −11.3 | −26.5 | 76.6 | −15.2 | 0 | −2.8 |
| 1449 | GTGTTTGTGATCCCCACAGT | SEQ ID NO:713 | −11.3 | −27.6 | 78.6 | −14.5 | −1.8 | −7.1 |
| 1493 | TATGAACTCCACAATCTGTC | SEQ ID NO:715 | −11.3 | −20.9 | 62.7 | −9.6 | 0 | −2.6 |
| 1577 | TCATAAGGGCAAACATCACA | SEQ ID NO:715 | 11.3 | −20.5 | 60.5 | −9.2 | 0 | −4 |
| 1722 | ACTGACTTCTGATGATAAAG | SEQ ID NO:716 | −11.3 | −17.7 | 55.7 | −6.4 | 0 | −2.9 |
| 1805 | CAGAGTGCATATAAGTAATT | SEQ ID NO:717 | −11.3 | −18 | 56.7 | −6.7 | 0 | 5.5 |
| 1908 | CACTTGGCATAAGTGTGATC | SEQ ID NO:718 | −11.3 | −22 | 66 | −8.2 | −2.5 | −7.9 |
| 2228 | TTTAAATCAAGGTTTTAAAT | SEQ ID NO:719 | −11.3 | −13.9 | 47.5 | −1.4 | −1 | −4.6 |
| 2229 | TTTTAAATCAAGGTTTTAAA | SEQ ID NO:720 | −11.3 | −14 | 47.7 | −1.4 | −1.1 | −4.8 |
| 2517 | TCACTGGTCTGAATGAAGTA | SEQ ID NO:721 | −11.3 | −20.6 | 62.8 | −9.3 | 0 | −3 |
| 2762 | TTTCTTCCACCTACAGATAA | SEQ ID NO:722 | −11.3 | −22 | 64.9 | −10.7 | 0 | −2.4 |
| 2930 | ACACAAAGTAGTAGGATACC | SEQ ID NO:723 | −11.3 | −19.9 | 60.5 | −7.7 | −0.8 | 4.3 |
| 2939 | GAGATGAAAACACAAAGTAG | SEQ ID NO:724 | −11.3 | −15 | 49.2 | −3.7 | 0 | −2.9 |
| 190 | TCTCTGAAGGCCTTTGATTA | SEQ ID NO:725 | −11.2 | −23 | 68 | −10.4 | 0 | −10.8 |
| 216 | GCAGAATCATATCCTCTGTA | SEQ ID NO:726 | −11.2 | −22.7 | 67.7 | −10.3 | −1.1 | −4.9 |
| 401 | CATGTGTTGCCCAACGGGTA | SEQ ID NO:727 | −11.2 | −27.3 | 74 | −14.8 | −1.2 | −7 |
| 475 | TCCATTGTGAATAACGATAA | SEQ ID NO:728 | −11.2 | −17.9 | 54.5 | −6.1 | −0.3 | −3.5 |
| 601 | TTGACTTTCCCGATTGTCAT | SEQ ID NO:729 | −11.2 | −24.2 | 69.1 | −11.7 | −1.2 | −5.6 |
| 935 | CTTCCAGAAAGATGACGCGA | SEQ ID NO:730 | −11.2 | −22.7 | 63.3 | −11 | 0 | −7.9 |
| 976 | GATAGAAAGACGTCCATCCA | SEQ ID NO:731 | −11.2 | −22.5 | 64.2 | −10.7 | 0 | −8.6 |
| 1873 | GATCACAGGCATCAATTTAT | SEQ ID NO:732 | −11.2 | −20.6 | 62.2 | −9.4 | 0 | −4.7 |
| 1882 | GATGATCATGATCACAGGCA | SEQ ID NO:733 | −11.2 | −22.6 | 66.7 | −8.4 | −1 | −14.2 |
| 1899 | TAAGTGTGATCTCTCATGAT | SEQ ID NO:734 | −11.2 | −20.3 | 63.2 | −8.4 | −0.4 | −6.2 |
| 1900 | ATAAGTGTGATCTCTCATGA | SEQ ID NO:735 | −11.2 | −20.3 | 63.2 | −8.4 | −0.4 | −5.9 |
| 1904 | TGGCATAAGTGTGATCTCTC | SEQ ID NO:736 | −11.2 | −22.7 | 69.1 | −11.5 | 0 | −6.5 |
| 2458 | CTCAGATTGAAGTGGAGGGT | SEQ ID NO:737 | −11.2 | −23.2 | 69.2 | −12 | 0 | −3.9 |
| 2672 | TTTAAGTTTTACAGTTTGAT | SEQ ID NO:738 | −11.2 | −17.3 | 56.2 | −6.1 | 0 | −2.6 |
| 2761 | TTCTTCCACCTACAGATAAT | SEQ ID NO:739 | −11.2 | −21.9 | 64.5 | −10.7 | 0 | −2.4 |
| 2929 | CACAAAGTAGTAGGATACCC | SEQ ID NO:740 | −11.2 | −21.7 | 63.6 | −9.6 | −0.8 | −4.3 |
| 3055 | ATTAATTTAATAGCAGCTCT | SEQ ID NO:741 | −11.2 | −18.5 | 58 | 7.3 | 0 | −6.3 |
| 188 | TCTGAAGGCCTTTGATTAGG | SEQ ID NO:742 | −11.1 | −22.9 | 67.4 | −10.4 | 0 | −10.8 |
| 189 | CTCTGAAGGCCTTTGATTAG | SEQ ID NO:743 | −11.1 | −22.6 | 66.7 | −10.4 | 0 | −10.2 |
| 609 | CTGGTATCTTGACTTTCCCG | SEQ ID NO:744 | −11.1 | −25.5 | 72.1 | −14.4 | 0 | −3.2 |
| 1336 | GACTGGTGTGTTTCTGTCCA | SEQ ID NO:745 | −11.1 | −26.3 | 78.2 | −15.2 | 0 | −3.6 |
| 1596 | GAGATCCGATCATCACACAT | SEQ ID NO:746 | −11.1 | −23 | 66.2 | −11 | −0.7 | −7.5 |
| 1895 | TGTGATCTCTCATGATGATC | SEQ ID NO:747 | −11.1 | −21.1 | 65.4 | −8.4 | −1.4 | −10.3 |
| 2067 | AACTGTAAAGGGATCACGCT | SEQ ID NO:748 | −11.1 | −21.7 | 62.7 | −9.2 | −1.3 | −6.6 |
| 2678 | TTCAGTTTTAAGTTTTACAG | SEQ ID NO:749 | −11.1 | −17.8 | 57.9 | −6.7 | 0 | −2.6 |
| 2845 | TTAAAGTTTGTGCTATAAAA | SEQ ID NO:750 | −11.1 | −15 | 49.7 | −3.9 | 0 | −4.3 |
| 78 | CCAGGGGCGAGTGGCTGGCG | SEQ ID NO:751 | −11 | −32.4 | 84.3 | −19.7 | −1.7 | −8 |
| 137 | CATGGTAGTTTAAGTAAGCA | SEQ ID NO:752 | −11 | −19.9 | 61.5 | −8.9 | 0 | −4.1 |
| 238 | GCCTCCATCAAATCCCACAC | SEQ ID NO:753 | −11 | −27.7 | 74 | −16.7 | 0 | −2 |
| 242 | CATTGCCTCCATCAAATCCC | SEQ ID NO:754 | −11 | −26.7 | 72.1 | −15.7 | 0 | −3.7 |
| 382 | ATGAGCTATTCCAAGGTGTA | SEQ ID NO:755 | −11 | −22.8 | 67.9 | −11.8 | 0 | −5.1 |
| 383 | TATGAGCTATTCCAAGGTGT | SEQ ID NO:756 | −11 | −22.8 | 67.9 | −11.8 | 0 | −5.1 |
| 481 | GATGATTCCATTGTGAATAA | SEQ ID NO:757 | −11 | −18.6 | 57 | −6.9 | −0.5 | −6.1 |
| 1006 | GTGATCTCCTGCAGTTCGTT | SEQ ID NO:758 | −11 | −26.7 | 78 | −15.2 | 0 | −8.2 |
| 1205 | GCCGGCATCTCTGGATCTCC | SEQ ID NO:759 | −11 | −30.4 | 83.3 | −17.6 | −0.9 | −11.6 |
| 1299 | TCCACCATCACAGGCAACTC | SEQ ID NO:760 | −11 | −26.5 | 73.9 | −14.6 | −0.8 | −4.5 |
| 1698 | GTTGCTAGTTTCTGAATTTC | SEQ ID NO:761 | −11 | −20.9 | 65.5 | −9.9 | 0 | −4.7 |
| 1871 | TCACAGGCATCAATTTATCC | SEQ ID NO:762 | −11 | −22.4 | 66.2 | −11.4 | 0 | −4 |
| 2075 | AAGCCAGCAACTGTAAAGGG | SEQ ID NO:763 | −11 | −22.6 | 64.4 | −10.2 | −1.3 | −6.9 |
| 2530 | ATGCACTACTCTTTCACTGG | SEQ ID NO:764 | −11 | −23.3 | 69.4 | −12.3 | 0 | −5.5 |
| 2844 | TAAAGTTTGTGCTATAAAAT | SEQ ID NO:765 | −11 | −14.9 | 49.4 | −3.9 | 0 | −4.3 |
| 2879 | AATCATATTGTCAGTTGTCC | SEQ ID NO:766 | −11 | −21.4 | 65.8 | −10.4 | 0 | −2.1 |
| 77 | CAGGGGCGAGTGGCTGGCGG | SEQ ID NO:767 | −10.9 | −31.6 | 83.S | −19.7 | −0.9 | −6.3 |
| 120 | GCAAATATACCACACATGAT | SEQ ID NO:768 | −10.9 | −19.8 | 58.4 | −8.9 | 0 | −5.2 |
| 121 | AGCAAATATACCACATGA | SEQ ID NO:769 | −10.9 | −19.8 | 58.6 | −8.9 | 0 | −5.2 |
| 185 | GAAGGCCTTTGATTAGGGTC | SEQ ID NO:770 | −10.9 | −24.4 | 71.5 | −11.5 | 0.3 | −12.1 |
| 381 | TGAGCTATTCCAAGGTGTAC | SEQ ID NO:771 | −10.9 | −23 | 68.S | −12.1 | 0 | −5.1 |
| 416 | CAGGACTGGGTTCTCCATGT | SEQ ID NO:772 | −10.9 | −26.9 | 77.7 | −14.7 | −1.2 | −5.8 |
| 817 | GAGATTGCAGCTTCCTTTCT | SEQ ID NO:773 | −10.9 | −25.4 | 74.8 | −14.5 | 0 | −4.9 |
| 1070 | AACTGAAGTTGCCCTTCATG | SEQ ID NO:774 | −10.9 | −23.5 | 67.2 | −10 | −2.6 | −8.7 |
| 1156 | CACAGTATAGTCATCAAAGT | SEQ ID NO:775 | −10.9 | −19.4 | 60.6 | −8.5 | 0 | −2.7 |
| 1300 | TTCCACCATCACAGGCAACT | SEQ ID NO:776 | −10.9 | −26.2 | 72.6 | −14.4 | −0.7 | 4.4 |
| 1494 | ATATGAACTCCACAATCTGT | SEQ ID NO:777 | −10.9 | −20.5 | 61.3 | −9.6 | 0 | −2.5 |
| 2183 | TCATACAGTTTCGTACATTT | SEQ ID NO:778 | −10.9 | −20.3 | 62.4 | −8.9 | −0.1 | −4.8 |
| 2511 | GTCTGAATGAAGTATGGTGA | SEQ ID NO:779 | −10.9 | −20.2 | 62 | −9.3 | 0 | −3 |
| 2526 | ACTACTCTTTCACTGGTCTG | SEQ ID NO:780 | −10.9 | −23.3 | 70.9 | −12.4 | 0 | −2.5 |
| 2528 | GCACTACTCTTTCACTGGTC | SEQ ID NO:781 | −10.9 | −24.9 | 74.9 | −14 | 0 | −3.4 |
| 456 | AATTCATTATTTTTATCAGA | SEQ ID NO:782 | −10.8 | −16.1 | 53.1 | −5.3 | 0 | −2.7 |
| 566 | GCTTGGCAATTGTCTCTGTG | SEQ ID NO:783 | −10.8 | −24.9 | 73.6 | −13.6 | 0 | −8.3 |
| 625 | CACCAAGGTAGTAAAGCTGG | SEQ ID NO:784 | −10.8 | −22.4 | 65 | −11.6 | 0 | −5.1 |
| 633 | ACTCTCTCCACCAAGGTAGT | SEQ ID NO:785 | −10.8 | −26.3 | 76.2 | −15 | −0.2 | −5.1 |
| 851 | CCGGGAAAAGGCAGGTTGTG | SEQ ID NO:786 | −10.8 | −25.1 | 68.8 | −14.3 | 0 | −5.6 |
| 918 | CGATTGGTGTGTTCTATGAC | SEQ ID NO:787 | −10.8 | −22.2 | 66.5 | −11.4 | 0 | −2.1 |
| 969 | AGACGTCCATCCACTACTGC | SEQ ID NO:788 | −10.8 | −26.7 | 74.5 | −15.3 | 0 | −8.6 |
| 974 | TAGAAAGACGTCCATCCACT | SEQ ID NO:789 | −10.8 | −23 | 65.3 | −11.6 | 0 | −8.6 |
| 975 | ATAGAAAGACGTCCATCCAC | SEQ ID NO:790 | −10.8 | −22.1 | 63.4 | −10.7 | 0 | −8.6 |
| 1093 | AAATATTTCCTTCTGCATAA | SEQ ID NO:791 | −10.8 | −18.7 | 57.3 | −7.9 | 0 | −5.8 |
| 1597 | GGAGATCCGATCATCACACA | SEQ ID NO:792 | −10.8 | −24.2 | 68.7 | −12.5 | −0.7 | −7.5 |
| 2184 | ATCATACAGTTTCGTACATT | SEQ ID NO:793 | −10.8 | −20.2 | 62.1 | −8.9 | −0.1 | −4.8 |
| 2345 | CCACAAATTACTGGGAAAAT | SEQ ID NO:794 | −10.8 | −18 | 54 | −7.2 | 0 | −4.9 |
| 2852 | CTTGAATTTAAAGTTTGTGC | SEQ ID NO:795 | −10.8 | −17.8 | 56.2 | −7 | 0 | −4.9 |
| 130 | GTTTAAGTAAGCAAATATAC | SEQ ID NO:796 | −10.7 | −15.3 | 50.6 | −4.6 | 0 | −4.1 |
| 411 | CTGGGTTCTCCATGTGTTGC | SEQ ID NO:797 | −10.7 | −27.3 | 79.8 | −15.3 | −1.2 | −4.7 |
| 412 | ACTGGGTTCTCCATGTGTTG | SEQ ID NO:798 | −10.7 | −25.7 | 75.8 | −13.7 | −1.2 | −4.5 |
| 474 | CCATTGTGAATAACGATAAA | SEQ ID NO:799 | −10.7 | −16.8 | 51.8 | −6.1 | 0 | −3.5 |
| 499 | CAAGTCTTTGTAGTTGGTGA | SEQ ID NO:800 | −10.7 | −21.9 | 67.6 | −11.2 | 0 | −2.6 |
| 553 | CTCTGTGTCTGTTTCAGATT | SEQ ID NO:801 | −10.7 | −23.1 | 71.8 | −10.9 | −1.4 | −6.3 |
| 619 | GGTAGTAAAGCTGGTATCTT | SEQ ID NO:802 | −10.7 | −21.8 | 66.7 | −11.1 | 0 | −5.1 |
| 875 | AATACTCCACTGCTTTTTCT | SEQ ID NO:803 | −10.7 | −22.7 | 67.3 | −12 | 0 | −3.6 |
| 1012 | TCCGGGGTGATCTCCTGCAG | SEQ ID NO:804 | −10.7 | −29.7 | 81.5 | −18.1 | −0.8 | −8.4 |
| 1152 | GTATAGTCATCAAAGTTGAC | SEQ ID NO:805 | −10.7 | −18.7 | 59.4 | 7.3 | −0.4 | −6 |
| 1521 | GCCACACCAATCTCAGGACC | SEQ ID NO:806 | −10.7 | −28 | 75.9 | −17.3 | 0 | −3.7 |
| 1800 | TGCATATAAGTAATTTCTTT | SEQ ID NO:807 | −10.7 | −17.1 | 55 | −5.9 | −0.2 | −4.9 |
| 1816 | AAGGATGCCTTCAGAGTGCA | SEQ ID NO:808 | −10.7 | −25.3 | 72.8 | −13.4 | −1.1 | −7 |
| 1867 | AGGCATCAATTTATCCACCA | SEQ ID NO:809 | −10.7 | −24 | 68.3 | −13.3 | 0 | −4 |
| 2010 | TTGATCGTTCTTTTTGTGTT | SEQ ID NO:810 | −10.7 | −21.4 | 66 | −10.7 | 0 | −5.3 |
| 2470 | ACATATTGTCTTCTCAGATT | SEQ ID NO:811 | −10.7 | −20.4 | 64 | −9.2 | −0.2 | −2.8 |
| 2527 | CACTACTCTTTCACTGGTCT | SEQ ID NO:812 | −10.7 | −24 | 72.3 | −13.3 | 0 | −2.5 |
| 2664 | TTACAGTTTGATTTAAAAAC | SEQ ID NO:813 | −10.7 | −14 | 47.7 | −3.3 | 0.2 | −5.2 |
| 3063 | ATATCAATATTAATTTAATA | SEQ ID NO:815 | −10.7 | −11.8 | 43.4 | −0.2 | −0.2 | −6.8 |
| 96 | GAGACACGGCCCGCGAGGCC | SEQ ID NO:815 | −10.6 | −33.1 | 81.9 | −18.4 | −3.6 | −16 |
| 527 | CATAGCCTTTGCTTTCCAAA | SEQ ID NO:816 | −10.6 | −23.9 | 67.8 | −11.9 | −1.3 | −4.8 |
| 620 | AGGTAGTAAAGCTGGTATCT | SEQ ID NO:817 | −10.6 | −21.7 | 66.6 | −11.1 | 0 | −5.1 |
| 637 | GATAACTCTCTCCACCAAGG | SEQ ID NO:818 | −10.6 | −23.8 | 68.1 | −13.2 | 0 | −3.6 |
| 1003 | ATCTCCTGCAGTTCGTTTAA | SEQ ID NO:819 | −10.6 | −24 | 70.4 | −12.9 | 0 | −7.7 |
| 1578 | ATCATAAGGGCAAACATCAC | SEQ ID NO:820 | −10.6 | −19.8 | 59.3 | −9.2 | 0 | −4 |
| 1866 | GGCATCAATTTATCCACCAA | SEQ ID NO:821 | −10.6 | −23.3 | 65.9 | −12.7 | 0 | −4 |
| 1881 | ATGATCATGATCACAGGCAT | SEQ ID NO:822 | −10.6 | −22 | 65.4 | −8.4 | −1 | −14.2 |
| 2469 | CATATTGTCTTCTCAGATTG | SEQ ID NO:823 | −10.6 | −20.2 | 63.3 | −9.1 | −0.2 | −3.6 |
| 2552 | TGGCTTTAGATACTCCAATT | SEQ ID NO:824 | −10.6 | −21.7 | 64.5 | −11.1 | 0 | −3.7 |
| 2586 | CCCTAACTGTCCAAGTATGA | SEQ ID NO:825 | −10.6 | −24.1 | 68.1 | −13.5 | 0 | −3 |
| 2673 | TTTTAAGTTTTACAGTTTGA | SEQ ID NO:826 | −10.6 | −17.4 | 56.6 | −6.8 | 0 | −2.6 |
| 3062 | TATCAATATTAATTTAATAG | SEQ ID NO:827 | −10.6 | −11.8 | 43.4 | −0.2 | −0.4 | −7.1 |
| 24 | ATCTGCGGGCTCGGGGGCCG | SEQ ID NO:828 | −10.5 | −33.6 | 85.3 | −19.5 | −3.6 | −11.8 |
| 36 | CTTCGGTGGGCAATCTGCGG | SEQ ID NO:829 | −10.5 | −27.9 | 75.6 | −15.2 | −2.2 | −6.6 |
| 94 | GACACGGCCCGCGAGGCCAG | SEQ ID NO:830 | −10.5 | −33.2 | 81.6 | −18.1 | −4.2 | −16.9 |
| 108 | CACATGATGCCGGAGACACG | SEQ ID NO:831 | −10.5 | −25.1 | 67.7 | −14.6 | 0 | −6.7 |
| 138 | ACATGGTAGTTTAAGTAAGC | SEQ ID NO:832 | −10.5 | −19.4 | 60.8 | −8.9 | 0 | −5.2 |
| 174 | ATTAGGGTCTCCAGGATTTC | SEQ ID NO:833 | −10.5 | −24.2 | 72.9 | −12.5 | −1.1 | −5.4 |
| 433 | CTGGGGGTGGCTATTGACAG | SEQ ID NO:834 | −10.5 | −26.1 | 74.9 | −15.6 | 0 | −3.7 |
| 936 | TCTTCCAGAAAGATGACGCG | SEQ ID NO:835 | −10.5 | −22.5 | 63.4 | −11 | −0.8 | 9 |
| 1325 | TTCTGTCCAGGAAGTCACTT | SEQ ID NO:836 | −10.5 | −24.3 | 72.4 | −13.3 | 0 | 7.5 |
| 1453 | AACTGTGTTTGTGATCCCCA | SEQ ID NO:837 | −10.5 | −25.9 | 73 | −15.4 | 0 | −4.3 |
| 1776 | TTCAGTGCCCCTTCAAGACA | SEQ ID NO:838 | −10.5 | −27.1 | 75.5 | −16.6 | 0 | −3.8 |
| 1809 | CCTTCAGAGTGCATATAAGT | SEQ ID NO:839 | −10.5 | −22.3 | 66.8 | −11.8 | 0 | −5.4 |
| 1883 | TGATGATCATGATCACAGGC | SEQ ID NO:840 | −10.5 | −21.9 | 65.4 | −8.4 | −1 | −14.2 |
| 1997 | TTGTGTTCTTAATGGTCTCA | SEQ ID NO:841 | −10.5 | −21.8 | 67.6 | −11.3 | 0 | −2.4 |
| 2006 | TCGTTCTTTTTGTGTTCTTA | SEQ ID NO:842 | −10.5 | −21.8 | 67.8 | −11.3 | 0 | −3 |
| 2227 | TTAAATCAAGGTTTTAAATA | SEQ ID NO:843 | −10.5 | −13.5 | 46.7 | −3 | 0 | −4.5 |
| 2302 | CACATATTGAGTGGAATAAT | SEQ ID NO:844 | −10.5 | −17.3 | 54.4 | −6.3 | −0.1 | −4.2 |
| 2311 | CACAAAAATCACATATTGAG | SEQ ID NO:845 | −10.5 | −15.2 | 49.4 | −4.1 | −0.3 | −4.5 |
| 2538 | CCAATTAAATGCACTACTCT | SEQ ID NO:846 | −10.5 | −20.1 | 59.5 | −9.6 | 0 | −5.5 |
| 2573 | AGTATGAGCATACACTGCCA | SEQ ID NO:847 | −10.5 | −24.2 | 70.1 | −12 | −1.7 | −9.6 |
| 2968 | AGATACAAGGAAATAAAAAA | SEQ ID NO:848 | −10.5 | −11.1 | 41.4 | −0.3 | 0 | −1.3 |
| 250 | ATCTTTATCATTGCCTCCAT | SEQ ID NO:849 | −10.4 | −24.2 | 70.5 | −13.8 | 0 | −3 |
| 337 | ATCTTGTTGCTTGTGAACTT | SEQ ID NO:850 | −10.4 | −21.8 | 66.3 | −11.4 | 0.6 | −4.2 |
| 567 | AGCTTGGCAATTGTCTCTGT | SEQ ID NO:851 | −10.4 | −24.9 | 74.1 | −13.6 | −0.7 | −7.6 |
| 923 | TGACGCGATTGGTGTGTTCT | SEQ ID NO:852 | −10.4 | −25.1 | 71.5 | −13.8 | −0.8 | −7.9 |
| 1126 | TCTCATTGTGTTCACGACAG | SEQ ID NO:853 | −10.4 | −22.6 | 67.6 | −11.3 | −0.7 | −6.4 |
| 1201 | GCATCTCTGGATCTCCTTTA | SEQ ID NO:854 | −10.4 | −25.4 | 75.1 | −14.5 | −0.1 | −5.3 |
| 1203 | CGGCATCTCTGGATCTCCTT | SEQ ID NO:855 | −10.4 | −27.6 | 77.7 | −16.3 | −0.7 | −5.3 |
| 1232 | TTGTTCCACAAGCAATAAGA | SEQ ID NO:856 | −10.4 | −20.1 | 60 | −8.8 | −0.7 | −5.8 |
| 1765 | TTCAAGACAAGTAGCATAAT | SEQ ID NO:857 | −10.4 | −17.7 | 55.6 | −7.3 | 0 | −4.1 |
| 1874 | TGATCACAGGCATCAATTTA | SEQ ID NO:858 | −10.4 | −20.6 | 62.1 | −10.2 | 0 | −6 |
| 2301 | ACATATTGAGTGGAATAATT | SEQ ID NO:859 | −10.4 | −16.7 | 53.4 | −6.3 | 0 | −3 |
| 2315 | ACTTCACAAAAATCACATAT | SEQ ID NO:860 | −10.4 | −16.1 | 51.4 | −5.7 | 0 | −1.8 |
| 2350 | GTCCTCCACAAATTACTGGG | SEQ ID NO:861 | −10.4 | −24.4 | 69.1 | −14 | 0.3 | −5.3 |
| 2964 | ACAAGGAAATAAAAAACACT | SEQ ID NO:862 | −10.4 | −12.8 | 44.4 | −2.4 | 0 | −2.1 |
| 82 | GAGGCCAGGGGCGAGTGGCT | SEQ ID NO:863 | −10.3 | −32.2 | 86.9 | −18.6 | −3.3 | −9.8 |
| 213 | GAATCATATCCTCTGTACTC | SEQ ID NO:864 | −10.3 | −21.7 | 66.1 | −11.4 | 0 | −4.8 |
| 560 | CAATTGTCTCTGTGTCTGTT | SEQ ID NO:865 | −10.3 | −22.9 | 70.5 | −12.6 | 0 | −5.5 |
| 600 | TGACTTTCCCGATTGTCATA | SEQ ID NO:866 | −10.3 | −23.8 | 68.1 | −12.4 | −1 | −5.2 |
| 713 | CTCGCCTTGTGCCAACTGCT | SEQ ID NO:867 | −10.3 | −29.7 | 79.4 | −18.4 | −0.9 | −6.1 |
| 715 | ACCTCGCCTTGTGCCAACTG | SEQ ID NO:868 | −10.3 | −29.2 | 77.3 | −18.4 | −0.1 | −4.6 |
| 871 | CTCCACTGCTTTTTCTTCCA | SEQ ID NO:869 | −10.3 | −26.7 | 76.6 | −16.4 | 0 | −3.6 |
| 877 | GTAATACTCCACTGCTTTTT | SEQ ID NO:870 | −10.3 | −22.3 | 66.4 | −12 | 0 | −3.6 |
| 933 | TCCAGAAAGATGACGCGATT | SEQ ID NO:871 | −10.3 | −21.8 | 61.5 | −11 | 0 | −7.9 |
| 934 | TTCCAGAAAGATGACGCGAT | SEQ ID NO:872 | −10.3 | −21.8 | 61.5 | −11 | 0 | −7.9 |
| 968 | GACGTCCATCCACTACTGCT | SEQ ID NO:873 | −10.3 | −27.6 | 76.1 | −17.3 | 0 | −7.4 |
| 1002 | TCTCCTGCAGTTCGTTTAAT | SEQ ID NO:874 | −10.3 | −24 | 70.4 | −13.2 | 0 | −8.2 |
| 1004 | GATCTCCTGCAGTTCGTTTA | SEQ ID NO:875 | −10.3 | −25.3 | 74.3 | −14.5 | 0 | −8.2 |
| 1155 | ACAGTATAGTCATCAAAGTT | SEQ ID NO:876 | −10.3 | −18.8 | 59.6 | −8.5 | 0 | −2.5 |
| 1580 | ACATCATAAGGGCAAACATC | SEQ ID NO:877 | −10.3 | −19.8 | 59.3 | −9.5 | 0 | −4 |
| 1644 | GGCAGCCGTTTCAATCCAAG | SEQ ID NO:878 | −10.3 | −26.5 | 72.5 | −15.7 | 0 | −8.3 |
| 1647 | TCAGGCAGCCGTTTCAATCC | SEQ ID NO:879 | −10.3 | −27.6 | 76.5 | −16.5 | −0.3 | −9 |
| 1767 | CCTTCAAGACAAGTAGCATA | SEQ ID NO:880 | −10.3 | −21.3 | 63.3 | −11 | 0 | −4.1 |
| 1891 | ATCTCTCATGATGATCATGA | SEQ ID NO:881 | −10.3 | −20.6 | 63.4 | −7.2 | −3.1 | −10.6 |
| 2551 | GGCTTTAGATACTCCAATTA | SEQ ID NO:882 | −10.3 | −21.4 | 64 | −11.1 | 0 | −3.7 |
| 2920 | GTAGGATACCCAACATGTAC | SEQ ID NO:883 | −10.3 | −22.6 | 65.7 | −11.2 | −1 | −8.1 |
| 2963 | CAAGGAAATAAAAAACACTT | SEQ ID NO:884 | −10.3 | −12.7 | 44.2 | −2.4 | 0 | −2.8 |
| 426 | TGGCTATTGACAGGACTGGG | SEQ ID NO:885 | −10.2 | −24.5 | 70.8 | −14.3 | 0 | −5.8 |
| 427 | GTGGCTATTGACAGGACTGG | SEQ ID NO:886 | −10.2 | −24.5 | 71.5 | −14.3 | 0 | −5.8 |
| 878 | AGTAATACTCCACTGCTTTT | SEQ ID NO:887 | −10.2 | −22.2 | 66.3 | −12 | 0 | −4.9 |
| 1158 | TTCACAGTATAGTCATCAAA | SEQ ID NO:888 | −10.2 | −18.7 | 59 | −8.5 | 0 | −2.7 |
| 1168 | ACCACCCAAATTCACAGTAT | SEQ ID NO:889 | −10.2 | −23.4 | 65.7 | −13.2 | 0 | −3.1 |
| 1189 | CTCCTTTATGTGATCCTTCA | SEQ ID NO:890 | −10.2 | −24.4 | 71.7 | −13.6 | −0.3 | −5.5 |
| 1333 | TGGTGTGTTTCTGTCCAGGA | SEQ ID NO:891 | −10.2 | −26.4 | 78.6 | −16.2 | 0 | −5.3 |
| 1576 | CATAAGGGCAAACATCACAA | SEQ ID NO:892 | −10.2 | −19.4 | 57.4 | −9.2 | 0 | −4 |
| 1804 | AGAGTGCATATAAGTAATTT | SEQ ID NO:893 | −10.2 | −17.4 | 55.8 | −6.7 | −0.2 | −6.1 |
| 2131 | TTTGGCAAGATTCCGTGGGA | SEQ ID NO:894 | −10.2 | −25.3 | 70.8 | −14.6 | −0.1 | −4.4 |
| 2363 | TCCATTATTCAAAGTCCTCC | SEQ ID NO:895 | −10.2 | −23.6 | 68.4 | −13.4 | 0 | −1.6 |
| 2518 | TTCACTGGTCTGAATGAAGT | SEQ ID NO:896 | −10.2 | −21 | 63.8 | −10.3 | −0.2 | −4.3 |
| 2559 | CTGCCACTGGCTTTAGATAC | SEQ ID NO:897 | −10.2 | −24.8 | 71.5 | −12.5 | −2.1 | −9.7 |
| 2694 | CCTACCAATAAAATTTTTCA | SEQ ID NO:898 | −10.2 | −17.9 | 54.5 | −7.7 | 0 | −6.7 |
| 4 | GGGTGGCGCCGACACGACTC | SEQ ID NO:899 | −10.1 | −30.6 | 79.1 | −18.4 | −1.6 | −12.1 |
| 26 | CAATCTGCGGGCTCGGGGGC | SEQ ID NO:900 | −10.1 | −30.8 | 81.1 | −19.8 | −0.7 | −8.1 |
| 103 | GATGCCGGAGACACGGCCCG | SEQ ID NO:901 | −10.1 | −31.3 | 77.6 | −17.1 | −4.1 | −10.6 |
| 126 | AAGTAAGCAAATATACCACA | SEQ ID NO:902 | −10.1 | −17.8 | 54.6 | −7.7 | 0 | −4.1 |
| 304 | CTTAACTTTTCCTTTCTTCT | SEQ ID NO:903 | −10.1 | −21.6 | 66 | −11.5 | 0 | −2.2 |
| 422 | TATTGACAGGACTGGGTTCT | SEQ ID NO:904 | −10.1 | −23.2 | 69.3 | −13.1 | 0 | −5.8 |
| 462 | ACGATAAATTCATTATTTTT | SEQ ID NO:905 | −10.1 | −15.3 | 50.2 | −4.5 | −0.5 | −3.8 |
| 647 | CCAATTGTTGGATAACTCTC | SEQ ID NO:906 | −10.1 | −21 | 62.7 | −9.5 | −1.3 | −6.3 |
| 655 | AGCACCTTCCAATTGTTGGA | SEQ ID NO:907 | −10.1 | −25.3 | 71.6 | −12.7 | −2.5 | −9.1 |
| 705 | GTGCCAACTGCTTGCCCGGG | SEQ ID NO:908 | −10.1 | −31.9 | 82.1 | −20.1 | −0.9 | −11.5 |
| 717 | CTACCTCGCCTTGTGCCAAC | SEQ ID NO:909 | −10.1 | −28.9 | 77 | −18.2 | 0.3 | −4.6 |
| 725 | ACAGAGGGCTACCTCGCCTT | SEQ ID NO:910 | −10.1 | −29.4 | 79.9 | −15.4 | −3.9 | −9.6 |
| 802 | TTTCTTGTCTTTGCCTGTTC | SEQ ID NO:911 | −10.1 | −24.7 | 75.2 | −14.6 | 0 | −3 |
| 882 | GCAAAGTAATACTCCACTGC | SEQ ID NO:912 | −10.1 | −22.1 | 64.4 | −12 | 0 | −5.6 |
| 885 | GAAGCAAAGTAATACTCCAC | SEQ ID NO:913 | −10.1 | −19.3 | 58.1 | −9.2 | 0 | −5.6 |
| 1056 | TTCATGATCTGCTGGAGTTC | SEQ ID NO:915 | −10.1 | −23.3 | 70.9 | −13.2 | 0 | −7.1 |
| 1157 | TCACAGTATAGTCATCAAAG | SEQ ID NO:915 | −10.1 | −18.6 | 58.8 | −8.5 | 0 | −2.5 |
| 1202 | GGCATCTCTGGATCTCCTTT | SEQ ID NO:916 | −10.1 | −26.9 | 78.5 | −16.3 | −0.2 | −5.3 |
| 1213 | AATCAAACGCCGGCATCTCT | SEQ ID NO:917 | −10.1 | −24.9 | 67.4 | −13.1 | 0 | −11.6 |
| 1454 | CAACTGTGTTTGTGATCCCC | SEQ ID NO:918 | −10.1 | −25.9 | 73 | −15.8 | 0 | −4.3 |
| 1598 | TGGAGATCCGATCATCACAC | SEQ ID NO:919 | −10.1 | −23.5 | 67.5 | −12.5 | −0.7 | −7.5 |
| 1602 | TGCATGGAGATCCGATCATC | SEQ ID NO:920 | −10.1 | −24.2 | 69.2 | −13.2 | −0.7 | −7.5 |
| 1831 | TTTCAATTCACCAGCAAGGA | SEQ ID NO:921 | −10.1 | −22.3 | 65 | −11.4 | −0.6 | −4.9 |
| 2457 | TCAGATTGAAGTGGAGGGTC | SEQ ID NO:922 | −10.1 | −22.7 | 68.8 | −12.6 | 0 | −2.5 |
| 2928 | ACAAAGTAGTAGGATACCCA | SEQ ID NO:923 | −10.1 | −21.7 | 63.6 | −10.5 | −1 | −4.1 |
| 54 | CGGGGGTGCACACACGAGCT | SEQ ID NO:924 | −10 | −29.4 | 78 | −17.8 | −1.6 | −9 |
| 76 | AGGGGCGAGTGGCTGGCGGG | SEQ ID NO:925 | −10 | −32.1 | 85 | −20.4 | −1.7 | −6.3 |
| 480 | ATGATTCCATTGTGAATAAC | SEQ ID NO:926 | −10 | −18.2 | 56.3 | −7.5 | −0.5 | −6.1 |
| 498 | AAGTCTTTGTAGTTGGTGAT | SEQ ID NO:927 | −10 | −21.2 | 66.3 | −11.2 | 0 | −2.4 |
| 605 | TATCTTGACTTTCCCGATTG | SEQ ID NO:928 | −10 | −22.9 | 66.1 | −12.9 | 0 | −2.8 |
| 1015 | TCGTCCGGGGTGATCTCCTG | SEQ ID NO:929 | −10 | −29.6 | 80.6 | −18.7 | −0.8 | −6.6 |
| 1077 | ATAAATGAACTGAAGTTGCC | SEQ ID NO:930 | −10 | −18.3 | 55.8 | −8.3 | 0 | −5.7 |
| 1159 | ATTCACAGTATAGTCATCAA | SEQ ID NO:931 | −10 | −19.4 | 61.1 | −9.4 | 0 | −2.7 |
| 1498 | ATTAATATGAACTCCACAAT | SEQ ID NO:932 | −10 | −17.1 | 53.3 | −7.1 | 0 | −5 |
| 1697 | TTGCTAGTTTCTGAATTTCG | SEQ ID NO:933 | −10 | −20.5 | 62.5 | −10.5 | 0 | −5 |
| 1815 | AGGATGCCTTCAGAGTGCAT | SEQ ID NO:934 | −10 | −26 | 75.3 | −13.4 | −2.6 | −6.8 |
| 2008 | GATCGTTCTTTTTGTGTTCT | SEQ ID NO:935 | −10 | −22.6 | 69.5 | −12.6 | 0 | −4.7 |
| 2012 | CCTTGATCGTTCTTTTTGTG | SEQ ID NO:936 | −10 | −23 | 68.1 | −13 | 0 | −5.3 |
| 2185 | AATCATACAGTTTCGTACAT | SEQ ID NO:937 | −10 | −19.4 | 59.6 | −8.9 | −0.1 | −4.8 |
| 2312 | TCACAAAAATCACATATTGA | SEQ ID NO:938 | −10 | −15.6 | 50.4 | −5.1 | −0.1 | −4.2 |
| 2341 | AAATTACTGGGAAAATGTAA | SEQ ID NO:939 | −10 | −14.6 | 48.2 | −4.1 | −0.1 | −4 |
| 2486 | GTACCAATTTTTAGAAACAT | SEQ ID NO:940 | −10 | −17.3 | 54.2 | −7.3 | 0 | −3.2 |
| 2489 | CAAGTACCAATTTTTAGAAA | SEQ ID NO:941 | −10 | −16.4 | 52.1 | −6.4 | 0 | −4.4 |
| 2490 | ACAAGTACCAATTTTTAGAA | SEQ ID NO:942 | −10 | −17.3 | 54.3 | −7.3 | 0 | −4.4 |
| 3056 | TATTAATTTAATAGCAGCTC | SEQ ID NO:943 | −10 | −17.3 | 55.5 | −7.3 | 0 | −6.3 |
| 117 | AATATACCACACATGATGCC | SEQ ID NO:944 | −9.9 | −21.8 | 62.6 | −11.9 | 0 | −5.2 |
| 451 | ATTATTTTTATCAGAGCGCT | SEQ ID NO:945 | −9.9 | −20.9 | 63.3 | −10.2 | 0 | −9.4 |
| 452 | CATTATTTTTATCAGAGCGC | SEQ ID NO:946 | −9.9 | −20.7 | 62.6 | −10.8 | 0 | −7.2 |
| 501 | TTCAAGTCTTTGTAGTTGGT | SEQ ID NO:947 | −9.9 | −21.8 | 68.4 | −11.2 | −0.5 | −3.5 |
| 654 | GCACCTTCCAATTGTTGGAT | SEQ ID NO:948 | −9.9 | −25.3 | 71.3 | −12.7 | −2.7 | −8.7 |
| 660 | GCAAAAGCACCTTCCAATTG | SEQ ID NO:949 | −9.9 | −22.6 | 63.4 | −12.7 | 0 | −5.9 |
| 716 | TACCTCGCCTTGTGCCAACT | SEQ ID NO:950 | −9.9 | −28.9 | 77 | −18.4 | −0.3 | −4.6 |
| 727 | CAACAGAGGGCTACCTCGCC | SEQ ID NO:951 | −9.9 | −28.4 | 76.3 | −15.4 | −3.1 | −9.6 |
| 886 | AGAAGCAAAGTAATACTCCA | SEQ ID NO:952 | −9.9 | −19.1 | 57.8 | −9.2 | 0 | −5.6 |
| 887 | CAGAAGCAAAGTAATACTCC | SEQ ID NO:953 | −9.9 | −19.1 | 57.8 | −9.2 | 0 | −5.6 |
| 932 | CCAGAAAGATGACGCGATTG | SEQ ID NO:954 | −9.9 | −21.4 | 60.2 | −11 | 0 | −7.9 |
| 1693 | TAGTTTCTGAATTTCGTCAT | SEQ ID NO:955 | −9.9 | −20 | 61.9 | −10.1 | 0 | −5 |
| 1720 | TGACTTCTGATGATAAAGTT | SEQ ID NO:956 | −9.9 | −17.9 | 56.5 | −7.1 | −0.7 | −4 |
| 1723 | AACTGACTTCTGATGATAAA | SEQ ID NO:957 | −9.9 | −17 | 53.7 | −7.1 | 0 | −2.7 |
| 1823 | CACCAGCAAGGATGCCTTCA | SEQ ID NO:958 | −9.9 | −27.1 | 74.4 | −15.7 | −1.4 | −5.9 |
| 1890 | TCTCTCATGATGATCATGAT | SEQ ID NO:959 | −9.9 | −20.6 | 63.4 | −7.2 | −3.5 | −11.1 |
| 2176 | GTTTCGTACATTTTGTATAG | SEQ ID NO:960 | −9.9 | −19.3 | 60.7 | −8.5 | −0.8 | −4.3 |
| 2177 | AGTTTCGTACATTTTGTATA | SEQ ID NO:961 | −9.9 | −19.3 | 60.7 | −8.5 | −0.8 | −4.8 |
| 2220 | AAGGTTTTAAATACAAAAGG | SEQ ID NO:962 | −9.9 | −14 | 47.2 | −4.1 | 0 | −5.4 |
| 2300 | CATATTGAGTGGAATAATTA | SEQ ID NO:963 | −9.9 | −16.2 | 52.4 | −6.3 | 0 | −4.1 |
| 2468 | ATATTGTCTTCTCAGATTGA | SEQ ID NO:964 | −9.9 | −20.1 | 63.4 | −9.7 | −0.2 | −4.5 |
| 2537 | CAATTAAATGCACTACTCTT | SEQ ID NO:965 | −9.9 | −18.2 | 56.2 | −8.3 | 0 | −5.5 |
| 2695 | TCCTACCAATAAAATTTTTC | SEQ ID NO:966 | −9.9 | −17.6 | 54.4 | −7.7 | 0 | −6.7 |
| 2776 | TTTCGCTTCCTAAATTTCTT | SEQ ID NO:967 | −9.9 | −21.4 | 63.4 | −11.5 | 0 | −4.9 |
| 2849 | GAATTTAAAGTTTGTGCTAT | SEQ ID NO:968 | −9.9 | −17.4 | 55.3 | −7.5 | 0 | −4.9 |
| 31 | GTGGGCAATCTGCGGGCTCG | SEQ ID NO:969 | −9.8 | −29.6 | 79.4 | −17.6 | −2.2 | −8.1 |
| 428 | GGTGGCTATTGACAGGACTG | SEQ ID NO:970 | −9.8 | −24.5 | 71.5 | −14.7 | 0 | −5.3 |
| 432 | TGGGGGTGGCTATTGACAGG | SEQ ID NO:971 | −9.8 | −26.4 | 75.5 | −16.6 | 0 | −3.7 |
| 500 | TCAAGTCTTTGTAGTTGGTG | SEQ ID NO:972 | −9.8 | −21.7 | 67.9 | −11.2 | −0.5 | −3.5 |
| 538 | AGATTCGAAGTCATAGCCTT | SEQ ID NO:973 | −9.8 | −22.6 | 66.5 | −12.3 | −0.1 | −7.6 |
| 646 | CAATTGTTGGATAACTCTCT | SEQ ID NO:974 | −9.8 | −19.9 | 60.9 | −9.5 | −0.3 | −5.5 |
| 1214 | GAATCAAACGCCGGCATCTC | SEQ ID NO:975 | −9.8 | −24.6 | 66.9 | −13.1 | 0 | −11.6 |
| 1286 | GCAACTCAGTCAGCTCCTCA | SEQ ID NO:976 | −9.8 | −27.4 | 79.4 | −17.6 | 0 | −4.4 |
| 1295 | CCATCACAGGCAACTCAGTC | SEQ ID NO:977 | −9.8 | −25.5 | 73.4 | −14.8 | −0.8 | −4 |
| 1297 | CACCATCACAGGCAACTCAG | SEQ ID NO:978 | −9.8 | −24.8 | 70.1 | −14.1 | −0.8 | −4.5 |
| 1326 | TTTCTGTCCAGGAAGTCACT | SEQ ID NO:979 | −9.8 | −24.3 | 72.4 | −14 | −0.1 | −5.5 |
| 1329 | GTGTTTCTGTCCAGGAAGTC | SEQ ID NO:980 | −9.8 | −24.9 | 75.7 | −14.6 | −0.1 | −5.5 |
| 1603 | TTGCATGGAGATCCGATCAT | SEQ ID NO:981 | −9.8 | −23.9 | 68 | −13.2 | −0.7 | −7.5 |
| 1771 | TGCCCCTTCAAGACAAGTAG | SEQ ID NO:982 | −9.8 | −24.9 | 69.8 | −15.1 | 0 | −3 |
| 1909 | ACACTTGGCATAAGTGTGAT | SEQ ID NO:983 | −9.8 | −21.8 | 65.1 | −8.2 | −3.8 | −10.4 |
| 1910 | GACACTTGGCATAAGTGTGA | SEQ ID NO:984 | −9.8 | −22.4 | 66.4 | −8.2 | −4.4 | −11.2 |
| 2307 | AAAATCACATATTGAGTGGA | SEQ ID NO:985 | −9.8 | −17.3 | 54.3 | −6.9 | −0.3 | −4.7 |
| 2520 | CTTTCACTGGTCTGAATGAA | SEQ ID NO:986 | −9.8 | −20.8 | 62.7 | −10.4 | −0.3 | −4.4 |
| 2777 | ATTTCGCTTCCTAAATTTCT | SEQ ID NO:987 | −9.8 | −21.3 | 63.1 | −11.5 | 0 | −4.9 |
| 2945 | TTTTAGGAGATGAAAACACA | SEQ ID NO:988 | −9.8 | −16.7 | 52.9 | −6.9 | 0 | −3 |
| 53 | GGGGGTGCACACACGAGCTT | SEQ ID NO:989 | −9.7 | −28.7 | 78.7 | −16.6 | −2.4 | −9.8 |
| 116 | ATATACCACACATGATGCCG | SEQ ID NO:990 | −9.7 | −23.3 | 64.9 | −13.6 | 0 | −5.2 |
| 656 | AAGCACCTTCCAATTGTTGG | SEQ ID NO:991 | −9.7 | −24 | 68.1 | −12.7 | −1.5 | −7.1 |
| 870 | TCCACTGCTTTTTCTTCCAC | SEQ ID NO:992 | −9.7 | −26 | 75.2 | −16.3 | 0 | −3.6 |
| 1081 | CTGCATAAATGAACTGAAGT | SEQ ID NO:993 | −9.7 | −17.8 | 54.8 | −8.1 | 0 | −4.9 |
| 1153 | AGTATAGTCATCAAAGTTGA | SEQ ID NO:994 | −9.7 | −18.5 | 59 | −8.8 | 0 | −5.7 |
| 1167 | CCACCCAAATTCACAGTATA | SEQ ID NO:995 | −9.7 | −22.9 | 64.6 | −13.2 | 0 | −3.1 |
| 1291 | CACAGGCAACTCAGTCAGCT | SEQ ID NO:996 | −9.7 | −25.8 | 74.7 | −15.2 | −0.8 | −5.7 |
| 1492 | ATGAACTCCACAATCTGTCT | SEQ ID NO:997 | −9.7 | −22.1 | 65.2 | −12.4 | 0 | −2.6 |
| 1497 | TTAATATGAACTCCACAATC | SEQ ID NO:998 | −9.7 | −17.5 | 54.5 | −7.8 | 0 | −2.7 |
| 2186 | TAATCATACAGTTTCGTACA | SEQ ID NO:999 | −9.7 | −19.1 | 59.1 | −8.9 | −0.1 | −4.8 |
| 2316 | AACTTCACAAAAATCACATA | SEQ ID NO:1000 | −9.7 | −15.4 | 49.8 | −5.7 | 0 | −1.1 |
| 2317 | TAACTTCACAAAAATCACAT | SEQ ID NO:1001 | −9.7 | −15.4 | 49.8 | −5.7 | 0 | −1.1 |
| 2587 | TCCCTAACTGTCCAAGTATG | SEQ ID NO:1002 | −9.7 | −23.9 | 68.3 | −13.5 | −0.5 | −3.2 |
| 2861 | CCAAAGCAGCTTGAATTTAA | SEQ ID NO:1003 | −9.7 | −19.7 | 58.3 | −9.4 | 0 | −8.4 |
| 122 | AAGCAAATATACCACACATG | SEQ ID NO:1004 | −9.6 | −18.5 | 55.6 | −8.9 | 0 | −4.7 |
| 192 | AGTCTCTGAAGGCCTTTGAT | SEQ ID NO:1005 | −9.6 | −24.4 | 71.9 | −13.4 | −0.1 | −10.8 |
| 461 | CGATAAATTCATTATTTTTA | SEQ ID NO:1006 | −9.6 | −14.8 | 49.2 | −4.5 | −0.5 | −4.9 |
| 464 | TAACGATAAATTCATTATTT | SEQ ID NO:1007 | −9.6 | −14.1 | 47.5 | −4.5 | 0 | −3.6 |
| 586 | GTCATACATATACTTAACGA | SEQ ID NO:1008 | −9.6 | −18.1 | S6.2 | −8.5 | 0 | −3.5 |
| 641 | GTTGGATAACTCTCTCCACC | SEQ ID NO:1009 | −9.6 | −25.1 | 72.5 | −14.2 | −1.2 | −4.7 |
| 706 | TGTGCCAACTGCTTGCCCGG | SEQ ID NO:1010 | −9.6 | −30.7 | 79.6 | −20.1 | −0.9 | −7 |
| 1018 | AGCTCGTCCGGGGTGATCTC | SEQ ID NO:1011 | −9.6 | −29.4 | 82.1 | −19.8 | 0 | −6.6 |
| 1119 | GTGTTCACGACAGACTCTGG | SEQ ID NO:1012 | −9.6 | −24.3 | 71.1 | −13.8 | −0.7 | −6.8 |
| 1504 | ACCAGCATTAATATGAACTC | SEQ ID NO:1013 | −9.6 | −19.6 | 59.1 | −10 | 0.3 | −4.2 |
| 1622 | TGATCTCTTTGCGTCTTTCT | SEQ ID NO:1015 | −9.6 | −24 | 72.1 | −14.4 | 0 | −4.9 |
| 1634 | TCAATCCAAGCATGATCTCT | SEQ ID NO:1015 | −9.6 | −22.5 | 66.1 | −12.9 | 0 | −4.9 |
| 1951 | AGGCCGCCCCTGCCGAGCAA | SEQ ID NO:1016 | −9.6 | −35.5 | 85.7 | −23.5 | −2.4 | −9 |
| 2064 | TGTAAAGGGATCACGCTGAG | SEQ ID NO:1017 | −9.6 | −21.9 | 63.7 | −11.8 | −0.1 | −5.3 |
| 2403 | TAATAGCTAGAATCTTTCTG | SEQ ID NO:1018 | −9.6 | −17.8 | 56.8 | −7.3 | −0.7 | −6.8 |
| 2405 | AATAATAGCTAGAATCTTTC | SEQ ID NO:1019 | −9.6 | −16.2 | 53 | −6.6 | 0 | −6 |
| 2507 | GAATGAAGTATGGTGAAACA | SEQ ID NO:1020 | −9.6 | −17.2 | 53.8 | −6.6 | −0.9 | −3.9 |
| 6 | CGGGGTGGCGCCGACACGAC | SEQ ID NO:1021 | −9.5 | −31.3 | 77.8 | −19.5 | −1.6 | −12.5 |
| 128 | TTAAGTAAGCAAATATACCA | SEQ ID NO:1022 | −9.5 | −16.7 | 52.7 | −7.2 | 0 | −4.1 |
| 129 | TTTAAGTAAGCAAATATACC | SEQ ID NO:1023 | −9.5 | −16.1 | 51.7 | −6.6 | 0 | −4.1 |
| 170 | GGGTCTCCAGGATTTCTCGT | SEQ ID NO:1024 | −9.5 | −27.7 | 80.2 | −17.5 | −0.4 | −4.8 |
| 298 | TTTTCCTTTCTTCTTAATAA | SEQ ID NO:1025 | −9.5 | −18.6 | 58.6 | −9.1 | 0 | −2.3 |
| 457 | AAATTCATTATTTTTATCAG | SEQ ID NO:1026 | −9.5 | −14.8 | 50 | −5.3 | 0 | −3.1 |
| 554 | TCTCTGTGTCTGTTTCAGAT | SEQ ID NO:1027 | −9.5 | −23.4 | 73.3 | −12.4 | −1.4 | −6.3 |
| 618 | GTAGTAAAGCTGGTATCTTG | SEQ ID NO:1028 | −9.5 | −20.6 | 63.8 | −11.1 | 0 | −5.1 |
| 876 | TAATACTCCACTGCTTTTTC | SEQ ID NO:1029 | −9.5 | −21.5 | 64.7 | −12 | 0 | −3.6 |
| 1005 | TGATCTCCTGCAGTTCGTTT | SEQ ID NO:1030 | −9.5 | −25.6 | 74.7 | −15.6 | 0 | −8.2 |
| 1121 | TTGTGTTCACGACAGACTCT | SEQ ID NO:1031 | −9.5 | −23.2 | 68.8 | −12.8 | −0.7 | −6.4 |
| 1231 | TGTTCCACAAGCAATAAGAA | SEQ ID NO:1032 | −9.5 | −19.3 | 57.8 | −9.8 | 0 | −4.8 |
| 1328 | TGTTTCTGTCCAGGAAGTCA | SEQ ID NO:1033 | −9.5 | −24.4 | 73.1 | −14.4 | −0.1 | −5.5 |
| 1649 | AATCAGGCAGCCGTTTCAAT | SEQ ID NO:1034 | −9.5 | −24.5 | 69.1 | −15 | 0.5 | −8.2 |
| 1814 | GGATGCCTTCAGAGTGCATA | SEQ ID NO:1035 | −9.5 | −25.7 | 74.4 | −13.4 | −2.8 | −6.9 |
| 1960 | AATTACCACAGGCCGCCCCT | SEQ ID NO:1036 | −9.5 | −31.4 | 79 | −21.2 | −0.5 | −7.7 |
| 2362 | CCATTATTCAAAGTCCTCCA | SEQ ID NO:1037 | −9.5 | −23.9 | 68 | −14.4 | 0 | −1.6 |
| 2488 | AAGTACCAATTTTTAGAAAC | SEQ ID NO:1038 | −9.5 | −15.9 | 51.3 | −6.4 | 0 | −4.4 |
| 186 | TGAAGGCCTTTGATTAGGGT | SEQ ID NO:1039 | −9.4 | −24 | 69.7 | −13.2 | −0.3 | −10.8 |
| 305 | CCTTAACTTTTCCTTTCTTC | SEQ ID NO:1040 | −9.4 | −22.7 | 67.8 | −13.3 | 0 | −2.2 |
| 657 | AAAGCACCTTCCAATTGTTG | SEQ ID NO:1041 | −9.4 | −22.1 | 63.6 | −12.7 | 0 | −7.1 |
| 661 | TGCAAAAGCACCTTCCAATT | SEQ ID NO:1042 | −9.4 | −22.6 | 63.4 | −12.7 | −0.1 | −4.8 |
| 662 | GTGCAAAAGCACCTTCCAAT | SEQ ID NO:1043 | −9.4 | −23.7 | 66 | −12.7 | −1.6 | −7.8 |
| 879 | AAGTAATACTCCACTGCTTT | SEQ ID NO:1044 | −9.4 | −21.4 | 63.8 | −12 | 0 | −5.6 |
| 973 | AGAAAGACGTCCATCCACTA | SEQ ID NO:1045 | −9.4 | −23 | 65.3 | −13.1 | 0 | −8.2 |
| 1038 | TCCATCTGGAGTGTTTGCAC | SEQ ID NO:1046 | −9.4 | −25.5 | 75 | −14.4 | −1.7 | −10 |
| 1120 | TGTGTTCACGACAGACTCTG | SEQ ID NO:1047 | −9.4 | −23.1 | 68.3 | −12.8 | −0.7 | −6.9 |
| 1215 | AGAATCAAACGCCGGCATCT | SEQ ID NO:1048 | −9.4 | −24.2 | 65.8 | −13.1 | 0 | −11.6 |
| 1489 | AACTCCACAATCTGTCTCCC | SEQ ID NO:1049 | −9.4 | −25.9 | 72.8 | −16.5 | 0 | −2.6 |
| 1692 | AGTTTCTGAATTTCGTCATC | SEQ ID NO:1050 | −9.4 | −20.7 | 64 | −11.3 | 0 | −5 |
| 1717 | CTTCTGATGATAAAGTTCTG | SEQ ID NO:1051 | −9.4 | −18.4 | 57.9 | −9 | 0 | −2.7 |
| 1819 | AGCAAGGATGCCTTCAGAGT | SEQ ID NO:1052 | −9.4 | −25.3 | 73.3 | −13.7 | −2.2 | −6.7 |
| 1966 | ATCACAAATTACCACAGGCC | SEQ ID NO:1053 | −9.4 | −23.2 | 65.5 | −13.8 | 0 | −6.4 |
| 2760 | TCTTCCACCTACAGATAATA | SEQ ID NO:1054 | −9.4 | −21.5 | 63.6 | −12.1 | 0 | −2.2 |
| 2923 | GTAGTAGGATACCCAACATG | SEQ ID NO:1055 | −9.4 | −22.4 | 65.4 | −12.1 | −0.8 | −6.1 |
| 173 | TTAGGGTCTCCAGGATTTCT | SEQ ID NO:1056 | −9.3 | −25.1 | 75 | −14.6 | −1.1 | −5 |
| 303 | TTAACTTTTCCTTTCTTCTT | SEQ ID NO:1057 | −9.3 | −20.8 | 64.3 | −11.5 | 0 | −2 |
| 399 | TGTGTTGCCCAACGGGTATG | SEQ ID NO:1058 | −9.3 | −26.6 | 72.9 | −16 | −1.2 | −7.7 |
| 463 | AACGATAAATTCATTATTTT | SEQ ID NO:1059 | −9.3 | −14.5 | 48.3 | −4.5 | −0.5 | −3.7 |
| 659 | CAAAAGCACCTTCCAATTGT | SEQ ID NO:1060 | −9.3 | −22 | 62.5 | −12.7 | 0 | −7.1 |
| 704 | TGCCAACTGCTTGCCCGGGA | SEQ ID NO:1061 | −9.3 | −31.3 | 80.1 | −20.1 | −0.9 | −11.9 |
| 726 | AACAGAGGGCTACCTCGCCT | SEQ ID NO:1062 | −9.3 | −28.6 | 77.1 | −15.4 | −3.9 | −9.6 |
| 1033 | CTGGAGTGTTTGCACAGCTC | SEQ ID NO:1063 | −9.3 | −25.8 | 76.5 | −14.6 | −1.9 | −8.4 |
| 1123 | CATTGTGTTCACGACAGACT | SEQ ID NO:1064 | −9.3 | −22.6 | 66.4 | −12.8 | −0.2 | −6.4 |
| 1301 | GTTCCACCATCACAGGCAAC | SEQ ID NO:1065 | −9.3 | −26.5 | 74 | −17.2 | 0 | −4 |
| 1599 | ATGGAGATCCGATCATCACA | SEQ ID NO:1066 | −9.3 | −23.3 | 66.9 | −13.3 | −0.4 | −7.2 |
| 1633 | CAATCCAAGCATGATCTCTT | SEQ ID NO:1067 | −9.3 | −22.2 | 65 | −12.9 | 0 | −4.9 |
| 1752 | GCATAATGATAGCCTCGTCC | SEQ ID NO:1068 | −9.3 | −25.3 | 71 | −16 | 0 | −3.5 |
| 1948 | CCGCCCCTGCCGAGCAACCA | SEQ ID NO:1069 | −9.3 | −35.4 | 83.6 | −25.2 | −0.7 | −7.1 |
| 1959 | ATTACCACAGGCCGCCCCTG | SEQ ID NO:1070 | −9.3 | −32.1 | 81.1 | −20.2 | −2.6 | −8.4 |
| 2063 | GTAAAGGGATCACGCTGAGA | SEQ ID NO:1071 | −9.3 | −22.5 | 65.1 | −12.7 | −0.1 | −5.3 |
| 2483 | CCAATTTTTAGAAACATATT | SEQ ID NO:1072 | −9.3 | −16 | 51.3 | −6.7 | 0 | −2.9 |
| 2582 | AACTGTCCAAGTATGAGCAT | SEQ ID NO:1073 | −9.3 | −22 | 65 | −12 | −0.5 | −5 |
| 2969 | CAGATACAAGGAAATAAAAA | SEQ ID NO:1074 | −9.3 | −12.5 | 43.9 | 3.2 | 0 | −1.3 |
| 3043 | GCAGCTCTGTGTTGTGATTT | SEQ ID NO:1075 | −9.3 | −25 | 75.4 | −15.7 | 0 | −4.8 |
| 43 | ACACGAGCTTCGGTGGGCAA | SEQ ID NO:1076 | −9.2 | −27.1 | 73.6 | −16.4 | −1.4 | −7.3 |
| 51 | GGGTGCACACACGAGCTTCG | SEQ ID NO:1077 | −9.2 | −27.5 | 75.1 | −15.9 | −2.4 | −11.8 |
| 204 | CCTCTGTACTCCAGTCTCTG | SEQ ID NO:1078 | −9.2 | −27.1 | 79.7 | −17 | −0.8 | −4.1 |
| 394 | TGCCCAACGGGTATGAGCTA | SEQ ID NO:1079 | −9.2 | −27.1 | 73.3 | −16.6 | −1.2 | −7.6 |
| 497 | AGTCTTTGTAGTTGGTGATG | SEQ ID NO:1080 | −9.2 | −21.9 | 68.7 | −12.7 | 0 | −2.3 |
| 599 | GACTTTCCCGATTGTCATAC | SEQ ID NO:1081 | −9.2 | −24 | 68.8 | −14.2 | −0.3 | −4.3 |
| 881 | CAAAGTAATACTCCACTGCT | SEQ ID NO:1082 | −9.2 | −21.2 | 62.2 | −12 | 0 | −5.6 |
| 978 | TGGATAGAAAGACGTCCATC | SEQ ID NO:1083 | −9.2 | −21 | 61.8 | −10.7 | −1 | −8.6 |
| 1292 | TCACAGGCAACTCAGTCAGC | SEQ ID NO:1084 | −9.2 | −25.3 | 74.5 | −15.2 | −0.8 | −5.8 |
| 1457 | TGCCAACTGTGTTTGTGATC | SEQ ID NO:1085 | −9.2 | −23.7 | 69.8 | −14.5 | 0 | −4.2 |
| 1764 | TCAAGACAAGTAGCATAATG | SEQ ID NO:1086 | −9.2 | −17.6 | 55.2 | −8.4 | 0 | −4.1 |
| 1972 | CTCCTTATCACAAATTACCA | SEQ ID NO:1087 | −9.2 | −21.3 | 62.1 | −12.1 | 0 | −3.2 |
| 2299 | ATATTGAGTGGAATAATTAT | SEQ ID NO:1088 | −9.2 | −15.5 | 51.1 | −6.3 | 0 | −5.9 |
| 2308 | AAAAATCACATATTGAGTGG | SEQ ID NO:1089 | −9.2 | −16 | 51.4 | −5.9 | −0.7 | −4.6 |
| 2353 | AAAGTCCTCCACAAATTACT | SEQ ID NO:1090 | −9.2 | −20.6 | 60.4 | −11.4 | 0 | −3.2 |
| 2460 | TTCTCAGATTGAAGTGGAGG | SEQ ID NO:1091 | −9.2 | −21.3 | 65.1 | −12.1 | 0 | −4.3 |
| 2580 | CTGTCCAAGTATGAGCATAC | SEQ ID NO:1092 | −9.2 | −22.4 | 66.6 | −12.5 | −0.3 | −8.3 |
| 224 | AATAAATCACATCTTCTCTT | SEQ ID NO:1093 | −9.2 | −17.7 | 56.1 | −8.5 | 0 | −1.2 |
| 2679 | TTTCAGTTTTAAGTTTTACA | SEQ ID NO:1094 | −9.2 | −17.9 | 58 | −8.7 | 0 | −2.6 |
| 2965 | TACAAGGAAATAAAAAACAC | SEQ ID NO:1095 | −9.2 | −11.6 | 42.3 | −2.4 | 0 | −1.2 |
| 97 | GGAGACACGGCCCGCGAGGC | SEQ ID NO:1096 | −9.1 | −32.3 | 81.1 | −20.6 | −2.1 | −13 |
| 119 | CAAATATACCACACATGATG | SEQ ID NO:1097 | −9.1 | −18 | 54.7 | −8.9 | 0 | −5.2 |
| 127 | TAAGTAAGCAAATATACCAC | SEQ ID NO:1098 | −9.1 | −16.8 | 52.8 | −7.7 | 0 | −4.1 |
| 244 | ATCATTGCCTCCATCAAATC | SEQ ID NO:1099 | −9.1 | −23.1 | 66.6 | −14 | 0 | −3.7 |
| 629 | TCTCCACCAAGGTAGTAAAG | SEQ ID NO:1100 | −9.1 | −22.2 | 65 | −12.6 | −0.2 | −4.9 |
| 640 | TTGGATAACTCTCTCCACCA | SEQ ID NO:1101 | −9.1 | −24.6 | 70.3 | −14.2 | −1.2 | −4.9 |
| 648 | TCCAATTGTTGGATAACTCT | SEQ ID NO:1102 | −9.1 | −21 | 62.7 | −9.5 | −2.4 | −7.7 |
| 768 | ATGTGATCAGTAGAAAGTTT | SEQ ID NO:1103 | −9.1 | −18.4 | 58.5 | −9.3 | 0 | −6.6 |
| 1001 | CTCCTGCAGTTCGTTTAATT | SEQ ID NO:1104 | −9.1 | −23.7 | 69.2 | −14.1 | 0 | −8.2 |
| 1766 | CTTCAAGACAAGTAGCATAA | SEQ ID NO:1105 | −9.1 | −18.6 | 57.5 | −9.5 | 0 | −4.1 |
| 1914 | TTCTGACACTTGGCATAAGT | SEQ ID NO:1106 | −9.1 | −22 | 65.8 | −11.9 | −0.9 | −4.8 |
| 2123 | GATTCCGTGGGAAATCAACA | SEQ ID NO:1107 | −9.1 | −22 | 62.6 | −11.4 | −1.4 | −6.5 |
| 2491 | AACAAGTACCAATTTTTAGA | SEQ ID NO:1108 | −9.1 | −17.3 | 54.3 | −8.2 | 0 | −3.6 |
| 2531 | AATGCACTACTCTTTCACTG | SEQ ID NO:1109 | −9.1 | −21.4 | 64.4 | −12.3 | 0 | −5.5 |
| 2950 | AACACTTTTAGGAGATGAAA | SEQ ID NO:1110 | −9.1 | −16.9 | 53.5 | −7.8 | 0 | −2.4 |
| 2951 | AAACACTTTTAGGAGATGAA | SEQ ID NO:1111 | −9.1 | −16.9 | 53.5 | −7.8 | 0 | −2.4 |
| 2952 | AAAACACTTTTAGGAGATGA | SEQ ID NO:1112 | −9.1 | −16.9 | 53.5 | −7.8 | 0 | −2.7 |
| 118 | AAATATACCACACATGATGC | SEQ ID NO:1113 | −9 | −19.1 | 57.2 | −10.1 | 0 | −5.2 |
| 125 | AGTAAGCAAATATACCACAC | SEQ ID NO:1115 | −9 | −18.7 | 56.8 | −9.7 | 0 | −3.3 |
| 245 | TATCATTGCCTCCATCAAAT | SEQ ID NO:1115 | −9 | −22.4 | 64.6 | −13.4 | 0 | −3.7 |
| 587 | TGTCATACATATACTTAACG | SEQ ID NO:1116 | −9 | −17.5 | 54.9 | −8.5 | 0 | −3 |
| 611 | AGCTGGTATCTTGACTTTCC | SEQ ID NO:1117 | −9 | −24.5 | 73.1 | −15.5 | 0 | −4.3 |
| 816 | AGATTGCAGCTTCCTTTCTT | SEQ ID NO:1118 | −9 | −24.9 | 73.8 | −15.9 | 0 | −5.2 |
| 937 | ATCTTCCAGAAAGATGACGC | SEQ ID NO:1119 | −9 | −21.7 | 63 | −11 | −1.7 | −6.7 |
| 1101 | GGCTGCTCAAATATTTCCTT | SEQ ID NO:1120 | −9 | −23.6 | 68.3 | −14.6 | 0 | −6.1 |
| 1448 | TGTTTGTGATCCCCACAGTT | SEQ ID NO:1121 | −9 | −26.5 | 75.4 | −15.4 | −2.1 | −7.1 |
| 1496 | TAATATGAACTCCACAATCT | SEQ ID NO:1122 | −9 | −18.3 | 56 | −9.3 | 0 | −2.7 |
| 1500 | GCATTAATATGAACTCCACA | SEQ ID NO:1123 | −9 | −20.3 | 60.1 | −10.6 | −0.4 | −5.2 |
| 1818 | GCAAGGATGCCTTCAGAGTG | SEQ ID NO:1124 | −9 | −25.3 | 72.8 | −14.8 | −1.4 | −5.5 |
| 1875 | ATGATCACAGGCATCAATTT | SEQ ID NO:1125 | −9 | −20.9 | 62.7 | −11.2 | −0.4 | −6.8 |
| 1958 | TTACCACAGGCCGCCCCTGC | SEQ ID NO:1126 | −9 | −33.9 | 85.1 | −22.1 | −2.8 | −8.7 |
| 2346 | TCCACAAATTACTGGGAAAA | SEQ ID NO:1127 | −9 | −18.4 | 55.1 | −8.8 | −0.3 | −5.9 |
| 2676 | CAGTTTTAAGTTTTACAGTT | SEQ ID NO:1128 | −9 | −18.6 | 59.7 | −9.6 | 0 | −2.6 |
| 2944 | TTTAGGAGATGAAAACACAA | SEQ ID NO:1129 | −9 | −15.9 | 51 | −6.9 | 0 | −2.5 |
| 3044 | AGCAGCTCTGTGTTGTGATT | SEQ ID NO:1130 | −9 | −24.9 | 75.3 | −15.9 | 0 | −5.6 |
| 217 | AGCAGAATCATATCCTCTGT | SEQ ID NO:1131 | −8.9 | −23 | 68.6 | −12.9 | −1.1 | −4.9 |
| 302 | TAACTTTTCCTTTCTTCTTA | SEQ ID NO:1132 | −8.9 | −20.4 | 63.3 | −11.5 | 0 | −1 |
| 608 | TGGTATCTTGACTTTCCCGA | SEQ ID NO:1133 | 8.9 | −25.2 | 71.5 | −16.3 | 0 | −3.2 |
| 884 | AAGCAAAGTAATACTCCACT | SEQ ID NO:1134 | −8.9 | −19.6 | 58.7 | −10.7 | 0 | −5.6 |
| 1079 | GCATAAATGAACTGAAGTTG | SEQ ID NO:1135 | −8.9 | −17 | 53.3 | −8.1 | 0 | −5.7 |
| 1080 | TGCATAAATGAACTGAAGTT | SEQ ID NO:1136 | −8.9 | −17 | 53.3 | −8.1 | 0 | −5.7 |
| 1082 | TCTGCATAAATGAACTGAAG | SEQ ID NO:1137 | −8.9 | −17 | 53.3 | −8.1 | 0 | −4.9 |
| 1102 | TGGCTGCTCAAATATTTCCT | SEQ ID NO:1138 | −8.9 | −23.5 | 67.9 | −14.6 | 0 | −6.1 |
| 1103 | CTGGCTGCTCAAATATTTCC | SEQ ID NO:1139 | −8.9 | −23.5 | 67.9 | −14.6 | 0 | −6.1 |
| 13337 | AGACTGGTGTGTTTCTGTCC | SEQ ID NO:1140 | −8.9 | −25.6 | 77.4 | −15.8 | −0.7 | −4 |
| 1861 | CAATTTATCCACCAAAGCCA | SEQ ID NO:1141 | −8.9 | −23 | 63.9 | −14.1 | 0 | −3.2 |
| 2298 | TATTGAGTGGAATAATTATA | SEQ ID NO:1142 | −8.9 | −15.2 | 50.5 | −6.3 | 0 | −6.2 |
| 2336 | ACTGGGAAAATGTAAGAGGT | SEQ ID NO:1143 | −8.9 | −19.2 | 58.2 | −10.3 | 0 | −2.2 |
| 2962 | AAGGAAATAAAAAACACTTT | SEQ ID NO:1144 | −8.9 | −12.1 | 43.3 | −3.2 | 0 | −2.8 |
| 37 | GCTTCGGTGGGCAATCTGCG | SEQ ID NO:1145 | −8.8 | −28.5 | 77.3 | 17.5 | −2.2 | −6.6 |
| 50 | GGTGCACACACGAGCTTCGG | SEQ ID NO:1146 | −8.8 | −27.5 | 75.1 | −16.2 | −2.4 | −12.3 |
| 151 | TCTCGTTCGAGGAACATGGT | SEQ ID NO:1147 | −8.8 | −24 | 68.9 | −13.3 | −1.9 | −9.1 |
| 251 | AATCTTTATCATTGCCTCCA | SEQ ID NO:1148 | −8.8 | −23.5 | 68.2 | −14.7 | 0 | −3 |
| 307 | TGCCTTAACTTTTCCTTTCT | SEQ ID NO:1149 | −8.8 | −24 | 70 | −15.2 | 0 | −3 |
| 465 | ATAACGATAAATTCATTATT | SEQ ID NO:1150 | −8.8 | −14 | 47.3 | −4.5 | −0.5 | −3.6 |
| 502 | TTTCAAGTCTTTGTAGTTGG | SEQ ID NO:1151 | −8.8 | −20.7 | 65.2 | −11.2 | −0.5 | −3.5 |
| 712 | TCGCCTTGTGCCAACTGCTT | SEQ ID NO:1152 | −8.8 | −28.9 | 77.9 | −19.1 | −0.9 | −6.1 |
| 1290 | ACAGGCAACTCAGTCAGCTC | SEQ ID NO:1153 | −8.8 | −25.5 | 75.4 | −15.8 | −0.8 | −5.8 |
| 1332 | GGTGTGTTTCTGTCCAGGAA | SEQ ID NO:1154 | −8.8 | −25.7 | 76.1 | −16.9 | 0 | −5.5 |
| 1726 | CAGAACTGACTTCTGATGAT | SEQ ID NO:1155 | −8.8 | −20 | 60.7 | −9 | −2.2 | −6.1 |
| 2132 | ATTTGGCAAGATTCCGTGGG | SEQ ID NO:1156 | −8.8 | −24.7 | 69.5 | −15.4 | −0.1 | −4.2 |
| 2519 | TTTCACTGGTCTGAATGAAG | SEQ ID NO:1157 | −8.8 | −19.9 | 61 | −10.4 | −0.5 | −4.6 |
| 2663 | TACAGTTTGATTTAAAAACA | SEQ ID NO:1158 | −8.8 | −14.6 | 48.7 | −4.1 | −1.7 | −6.3 |
| 3001 | CATTCAGCAGTCATTTAAAA | SEQ ID NO:1159 | −8.8 | −18.5 | 57.4 | −9.7 | 0 | −5 |
| 458 | TAAATTCATTATTTTTATCA | SEQ ID NO:1160 | −8.7 | −14.5 | 49.3 | −5.3 | −0.2 | −3.1 |
| 471 | TTGTGAATAACGATAAATTC | SEQ ID NO:1161 | −8.7 | −14.6 | 48.4 | −5.3 | −0.3 | −3.9 |
| 526 | ATAGCCTTTGCTTTCCAAAA | SEQ ID NO:1162 | −8.7 | −22.5 | 64.6 | −12.4 | −1.3 | −5.9 |
| 658 | AAAAGCACCTTCCAATTGTT | SEQ ID NO:1163 | −8.7 | −21.4 | 61.7 | −12.7 | 0 | −7.1 |
| 1160 | AATTCACAGTATAGTCATCA | SEQ ID NO:1164 | −8.7 | −19.4 | 61.1 | −10.7 | 0 | −2.7 |
| 1230 | GTTCCACAAGCAATAAGAAT | SEQ ID NO:1165 | −8.7 | −19.3 | 57.8 | −10.6 | 0 | −4.1 |
| 1539 | GTATAAGCCTTTGTACTGGC | SEQ ID NO:1166 | −8.7 | −23.8 | 70.2 | −13.5 | −1.5 | −7.8 |
| 1579 | CATCATAAGGGCAAACATCA | SEQ ID NO:1167 | −8.7 | −20.3 | 60 | −11.6 | 0 | −4 |
| 1716 | TTCTGATGATAAAGTTCTGT | SEQ ID NO:1168 | −8.7 | −18.7 | 59 | −10 | 0 | −2.7 |
| 1775 | TCAGTGCCCCTTCAAGACAA | SEQ ID NO:1169 | −8.7 | −26.2 | 72.7 | −17.6 | 0 | −3.8 |
| 1865 | GCATCAATTTATCCACCAAA | SEQ ID NO:1170 | −8.7 | −21.4 | 61.6 | −12.7 | 0 | −3.4 |
| 1884 | ATGATGATCATGATCACAGG | SEQ ID NO:1171 | −8.7 | −20.1 | 61.2 | −8.4 | −1 | −14.2 |
| 3048 | TAATAGCAGCTCTGTGTTGT | SEQ ID NO:1172 | −8.7 | −22.9 | 69.7 | −14.2 | 0 | −6.1 |
| 79 | GCCAGGGGCGAGTGGCTGGC | SEQ ID NO:1173 | −8.6 | −33.4 | 89.4 | −21.4 | −3.4 | −10 |
| 133 | GTAGTTTAAGTAAGCAAATA | SEQ ID NO:1174 | −8.6 | −16.3 | 53.1 | −7.7 | 0 | −4.1 |
| 140 | GAACATGGTAGTTTAAGTAA | SEQ ID NO:1175 | −8.6 | −17.5 | 55.7 | −8.9 | 0 | −5.2 |
| 242 | TCATTGCCTCCATCAAATCC | SEQ ID NO:1176 | −8.6 | −25.1 | 70.2 | −16.5 | 0 | −3.7 |
| 479 | TGATTCCATTGTGAATAACG | SEQ ID NO:1177 | −8.6 | −19 | 57 | −9.7 | −0.5 | −6.1 |
| 505 | CTTTTTCAAGTCTTTGTAGT | SEQ ID NO:1178 | −8.6 | −20.5 | 65 | −11.2 | −0.5 | −3.2 |
| 517 | GCTTTCCAAAAACTTTTTCA | SEQ ID NO:1179 | −8.6 | −19.8 | 59.3 | −11.2 | 0 | −4.9 |
| 663 | AGTGCAAAAGCACCTTCCAA | SEQ ID NO:1180 | −8.6 | −23.7 | 66.2 | −12.7 | −2.4 | −9 |
| 767 | TGTGATCAGTAGAAAGTTTA | SEQ ID NO:1181 | −8.6 | −18.1 | 57.9 | −9.5 | 0 | −6.6 |
| 880 | AAAGTAATACTCCACTGCTT | SEQ ID NO:1182 | −8.6 | −20.6 | 61.4 | −12 | 0 | −5.6 |
| 1122 | ATTGTGTTCACGACAGACTC | SEQ ID NO:1183 | −8.6 | −22.3 | 66.8 | −12.8 | −0.7 | −6.4 |
| 1169 | AACCACCCAAATTCACAGTA | SEQ ID NO:1184 | −8.6 | −22.7 | 63.7 | −14.1 | 0 | −3.1 |
| 1499 | CATTAATATGAACTCCACAA | SEQ ID NO:1185 | −8.6 | −17.8 | 54.5 | −9.2 | 0 | −5.2 |
| 1510 | CTCAGGACCAGCATTAATAT | SEQ ID NO:1186 | −8.6 | −22 | 64.6 | −13.4 | 0 | −4.2 |
| 1824 | TCACCAGCAAGGATGCCTTC | SEQ ID NO:1187 | −8.6 | −26.8 | 75 | −16 | −2.2 | −5.9 |
| 1952 | CAGGCCGCCCCTGCCGAGCA | SEQ ID NO:1188 | −8.6 | −36.9 | 88.9 | −25.9 | −2.4 | −8.8 |
| 2467 | TATTGTCTTCTCAGATTGAA | SEQ ID NO:1189 | −8.6 | −19.4 | 61.2 | −10.8 | 0.2 | −4.7 |
| 2501 | AGTATGGTGAAACAAGTACC | SEQ ID NO:1190 | −8.6 | −19.8 | S9.9 | −10.2 | −0.9 | −5.3 |
| 2558 | TGCCACTGGCTTTAGATACT | SEQ ID NO:1191 | −8.6 | −24.8 | 71.5 | −14.1 | −2.1 | −9.7 |
| 2779 | ATATTTCGCTTCCTAAATTT | SEQ ID NO:1192 | −8.6 | −19.7 | 59.3 | −11.1 | 0 | 4.5 |
| 2782 | GTAATATTTCGCTTCCTAAA | SEQ ID NO:1193 | −8.6 | −19.7 | 59.1 | −11.1 | 0 | −4.2 |
| 2848 | AATTTAAAGTTTGTGCTATA | SEQ ID NO:1194 | −8.6 | −16.5 | 53.5 | −7.9 | 0 | −4.9 |
| 2949 | ACACTTTTAGGAGATGAAAA | SEQ ID NO:1195 | −8.6 | −16.9 | 53.5 | −8.3 | 0 | −3 |
| 131 | AGTTTAAGTAAGCAAATATA | SEQ ID NO:1196 | −8.5 | −15.1 | 50.3 | −6.6 | 0 | −4.1 |
| 219 | CCAGCAGAATCATATCCTCT | SEQ ID NO:1197 | −8.5 | −24.5 | 70.3 | −16 | 0 | −4.1 |
| 504 | TTTTTCAAGTCTTTGTAGTT | SEQ ID NO:1198 | −8.5 | −19.7 | 63.3 | −11.2 | 0.1 | −2.9 |
| 561 | GCAATTGTCTCTGTGTCTGT | SEQ ID NO:1199 | −8.5 | −24.6 | 74.9 | −16.1 | 0 | −6.8 |
| 571 | AACGAGCTTGGCAATTGTCT | SEQ ID NO:1200 | −8.5 | −23.3 | 66.9 | −14.3 | 0.1 | −8.3 |
| 917 | GATTGGTGTGTTCTATGACA | SEQ ID NO:1201 | −8.5 | 22.1 | 67.5 | −13.6 | 0 | −3.2 |
| 998 | CTGCAGTTCGTTTAATTCGA | SEQ ID NO:1202 | −8.5 | −22.2 | 65.1 | −13 | −0.5 | −7.9 |
| 1034 | TCTGGAGTGTTTGCACAGCT | SEQ ID NO:1203 | −8.5 | −25.8 | 76.5 | −14.6 | −2.7 | −9.1 |
| 1421 | CTCTCTCCTTACAGTAACGA | SEQ ID NO:1204 | −8.5 | −23.3 | 68.1 | −14.8 | 0 | −4.7 |
| 1691 | GTTTCTGAATTTCGTCATCC | SEQ ID NO:1205 | −8.5 | −22.7 | 67.7 | −14.2 | 0 | −5 |
| 1762 | AAGACAAGTAGCATAATGAT | SEQ ID NO:1206 | −8.5 | −17.1 | 54 | −8.6 | 0 | −4.1 |
| 2122 | ATTCCGTGGGAAATCAACAT | SEQ ID NO:1207 | −8.5 | −21.4 | 61.4 | −11.4 | −1.4 | −6.5 |
| 2264 | AAGGATTTACTAAAAAAAGG | SEQ ID NO:1208 | −8.5 | −12.8 | 44.8 | −4.3 | 0 | −2.4 |
| 2297 | ATTGAGTGGAATAATTATAA | SEQ ID NO:1209 | −8.5 | −14.8 | 49.4 | −6.3 | 0 | −6.2 |
| 2313 | TTCACAAAAATCACATATTG | SEQ ID NO:1210 | −8.5 | −15.1 | 49.5 | −6.6 | 0 | −4 |
| 2472 | AAACATATTGTCTTCTCAGA | SEQ ID NO:1211 | −8.5 | −18.9 | 59.3 | −9.9 | −0.2 | −3.1 |
| 2581 | ACTGTCCAAGTATGAGCATA | SEQ ID NO:1212 | −8.5 | −22.4 | 66.6 | −13.9 | 0 | −4.9 |
| 2596 | GCAAACCCTTCCCTAACTGT | SEQ ID NO:1213 | −8.5 | −26.9 | 72.1 | −18.4 | 0 | −3.4 |
| 2696 | ATCCTACCAATAAAATTTTT | SEQ ID NO:1215 | −8.5 | −17.2 | 53.3 | −8.7 | 0 | −6.7 |
| 2860 | CAAAGCAGCTTGAATTTAAA | SEQ ID NO:1215 | −8.5 | −17 | 53 | −7.9 | 0 | −8.4 |
| 2940 | GGAGATGAAAACACAAAGTA | SEQ ID NO:1216 | −8.5 | −16.2 | 51.4 | −7.7 | 0 | −2.9 |
| 27 | GCAATCTGCGGGCTCGGGGG | SEQ ID NO:1217 | −8.4 | −30.8 | 81.1 | −20.9 | −1.4 | −8.1 |
| 141 | GGAACATGGTAGTTTAAGTA | SEQ ID NO:1218 | −8.4 | −19.4 | 60.3 | −11 | 0 | −5.2 |
| 193 | CAGTCTCTGAAGGCCTTTGA | SEQ ID NO:1219 | −8.4 | −25.1 | 73.1 | −15.2 | −0.1 | −10.9 |
| 423 | CTATTGACAGGACTGGGTTC | SEQ ID NO:1220 | −8.4 | −23.2 | 69.3 | −14.8 | 0 | −5.8 |
| 624 | ACCAAGGTAGTAAAGCTGGT | SEQ ID NO:1221 | −8.4 | −22.9 | 66.9 | −13.8 | −0.4 | −5.1 |
| 766 | GTGATCAGTAGAAAGTTTAT | SEQ ID NO:1222 | −8.4 | −18.1 | 58 | −9.7 | 0 | −6.6 |
| 801 | TTCTTGTCTTTGCCTGTTCT | SEQ ID NO:1223 | −8.4 | −25.5 | 76.9 | −17.1 | 0 | −3 |
| 809 | AGCTTCCTTTCTTGTCTTTG | SEQ ID NO:1224 | −8.4 | −24.4 | 74.1 | −16 | 0 | −4.3 |
| 1124 | TCATTGTGTTCACGACAGAC | SEQ ID NO:1225 | −8.4 | −22.1 | 66 | −12.8 | −0.7 | −5.7 |
| 1517 | CACCAATCTCAGGACCAGCA | SEQ ID NO:1226 | −8.4 | −26.5 | 73.3 | −18.1 | 0 | −4.1 |
| 1637 | GTTTCAATCCAAGCATGATC | SEQ ID NO:1227 | −8.4 | −21.7 | 64.6 | −13.3 | 0 | −4.8 |
| 1699 | TGTTGCTAGTTTCTGAATTT | SEQ ID NO:1228 | −8.4 | −20.5 | 63.8 | −12.1 | 0 | −4.7 |
| 1868 | CAGGCATCAATTTATCCACC | SEQ ID NO:1229 | −8.4 | −24 | 68.3 | −15.6 | 0 | −4 |
| 2003 | TTCTTTTTGTGTTCTTAATG | SEQ ID NO:1230 | −8.4 | −18.7 | 60 | −10.3 | 0 | −2.3 |
| 2335 | CTGGGAAAATGTAAGAGGTA | SEQ ID NO:1231 | −8.4 | −18.7 | 57.2 | −10.3 | 0 | −1.5 |
| 2347 | CTCCACAAATTACTGGGAAA | SEQ ID NO:1232 | −8.4 | −20 | 58.6 | −11 | −0.3 | −5.9 |
| 2532 | AAATGCACTACTCTTTCACT | SEQ ID NO:1233 | −8.4 | −20.7 | 62.4 | −12.3 | 0 | −5.5 |
| 2536 | AATTAAATGCACTACTCTTT | SEQ ID NO:1234 | −8.4 | −17.6 | 55.2 | −9.2 | 0 | −5.5 |
| 2539 | TCCAATTAAATGCACTACTC | SEQ ID NO:1235 | −8.4 | −19.6 | 58.9 | −11.2 | 0 | −5.5 |
| 2625 | AAATAAATCACATCTTCTCT | SEQ ID NO:1236 | −8.4 | −16.9 | 53.9 | −8.5 | 0 | 1.2 |
| 3045 | TAGCAGCTCTGTGTTGTGAT | SEQ ID NO:1237 | −8.4 | −24.5 | 74.2 | −16.1 | 0 | −6.1 |
| 377 | CTATTCCAAGGTGTACATCA | SEQ ID NO:1238 | −8.3 | −22.4 | 66.6 | −13.6 | 0 | −7.9 |
| 470 | TGTGAATAACGATAAATTCA | SEQ ID NO:1239 | −8.3 | −15.2 | 49.3 | −5.3 | −1.6 | −5.8 |
| 542 | TTTCAGATTCGAAGTCATAG | SEQ ID NO:1240 | −8.3 | −19.1 | 59.5 | −10.8 | 0.6 | −6.8 |
| 834 | GTGCTGTCCACACGAGAGAG | SEQ ID NO:1241 | −8.3 | −25.9 | 73.8 | −16.4 | −1.1 | −5.3 |
| 888 | TCAGAAGCAAAGTAATACTC | SEQ ID NO:1242 | −8.3 | −17.5 | 55.3 | −9.2 | 0 | −5.6 |
| 924 | ATGACGCGATTGGTGTGTTC | SEQ ID NO:1243 | −8.3 | −24.2 | 69.5 | −15 | −0.8 | −7.9 |
| 943 | ATCATCATCTTCCAGAAAGA | SEQ ID NO:1244 | −8.3 | −20.5 | 62 | −11 | −1.1 | −4 |
| 1447 | GTTTGTGATCCCCACAGTTA | SEQ ID NO:1245 | −8.3 | −26.2 | 75 | −15.8 | −2.1 | −7.1 |
| 1606 | TTCTTGCATGGAGATCCGAT | SEQ ID NO:1246 | −8.3 | −24.2 | 69.2 | −15.4 | −0.2 | −6.4 |
| 1621 | GATCTCTTTGCGTCTTTCTT | SEQ ID NO:1247 | −8.3 | −24.1 | 72.7 | −15.8 | 0 | −4.1 |
| 1755 | GTAGCATAATGATAGCCTCG | SEQ ID NO:1248 | −8.3 | −22.6 | 65.6 | −13.8 | −0.1 | −4.1 |
| 1756 | AGTAGCATAATGATAGCCTC | SEQ ID NO:1249 | −8.3 | −21.8 | 65.6 | −13 | −0.1 | −4.1 |
| 2316 | AAATCACATATTGAGTGGAA | SEQ ID NO:1250 | −8.3 | −17.3 | 54.3 | −8.1 | −0.7 | −4.7 |
| 2618 | TCACATCTTCTCTTAAAACT | SEQ ID NO:1251 | −8.3 | −18.8 | 58.6 | −10.5 | 0 | −2.3 |
| 2775 | TTCGCTTCCTAAATTTCTTC | SEQ ID NO:1252 | −8.3 | −21.7 | 64.5 | −13.4 | 0 | −4.9 |
| 2946 | CTTTTAGGAGATGAAAACAC | SEQ ID NO:1253 | −8.3 | −16.9 | 53.5 | −8.6 | 0 | −3 |
| 98 | CGGAGACACGGCCCGCGAGG | SEQ ID NO:1254 | −8.2 | −31.3 | 77 | −22 | −1 | −8.4 |
| 823 | ACGAGAGAGATTGCAGCTTC | SEQ ID NO:1255 | −8.2 | −23.2 | 68.5 | −15 | 0 | −5.3 |
| 826 | CACACGAGAGAGATTGCAGC | SEQ ID NO:1256 | −8.2 | −23.4 | 67.5 | −15.2 | 0 | −5.2 |
| 837 | GTTGTGCTGTCCACACGAGA | SEQ ID NO:1257 | −8.2 | −26.6 | 75.5 | −16.4 | −2 | −7.2 |
| 1100 | GCTGCTCAAATATTTCCTTC | SEQ ID NO:1258 | −8.2 | −22.8 | 67.3 | −14.6 | 0 | −6 |
| 1288 | AGGCAACTCAGTCAGCTCCT | SEQ ID NO:1259 | −8.2 | −27.5 | 79.5 | −18.4 | −0.7 | −5.7 |
| 1446 | TTTGTGATCCCCACAGTTAA | SEQ ID NO:1260 | −8.2 | −24.3 | 69.3 | −14 | −2.1 | −10.8 |
| 1886 | TCATGATGATCATGATCACA | SEQ ID NO:1261 | −8.2 | −20 | 61 | −8.4 | −3.3 | −14.2 |
| 2484 | ACCAATTTTTAGAAACATAT | SEQ ID NO:1262 | −8.2 | −16.1 | 51.5 | −7.9 | 0 | −2.6 |
| 2764 | AATTTCTTCCACCTACAGAT | SEQ ID NO:1263 | −8.2 | −22.3 | 65.4 | −14.1 | 0 | −2.4 |
| 2859 | AAAGCAGCTTGAATTTAAAG | SEQ ID NO:1264 | −8.2 | −16.3 | 51.9 | −7.5 | 0 | −8.4 |
| 2880 | AAATCATATTGTCAGTTGTC | SEQ ID NO:1265 | −8.2 | −18.7 | 59.5 | −10.5 | 0 | −2.1 |
| 2943 | TTAGGAGATGAAAACACAAA | SEQ ID NO:1266 | −8.2 | −15.1 | 49.1 | −6.9 | 0 | −2.5 |
| 134 | GGTAGTTTAAGTAAGCAAAT | SEQ ID NO:1267 | −8.1 | −17.8 | 56.2 | −9.7 | 0 | −4.1 |
| 145 | TCGAGGAACATGGTAGTTTA | SEQ ID NO:1268 | −8.1 | −21 | 63.1 | −12.9 | 0 | −5.2 |
| 338 | TATCTTGTTGCTTGTGAACT | SEQ ID NO:1269 | −8.1 | −21.4 | 65.3 | −12.8 | −0.1 | −4.9 |
| 469 | GTGAATAACGATAAATTCAT | SEQ ID NO:1270 | −8.1 | −15.2 | 49.3 | −5.3 | −1.8 | −6 |
| 628 | CTCCACCAAGGTAGTAAAGC | SEQ ID NO:1271 | −8.1 | −23.6 | 67.7 | −15 | −0.2 | −5.1 |
| 944 | CATCATCATCTTCCAGAAAG | SEQ ID NO:1272 | −8.1 | −20.6 | 61.9 | −12.5 | 0 | −2.9 |
| 1125 | CTCATTGTGTTCACGACAGA | SEQ ID NO:1273 | −8.1 | −22.8 | 67.4 | −13.8 | −0.7 | −6.4 |
| 1287 | GGCAACTCAGTCAGCTCCTC | SEQ ID NO:1274 | −8.1 | −27.9 | 81 | −19.1 | −0.4 | −4.9 |
| 1724 | GAACTGACTTCTGATGATAA | SEQ ID NO:1275 | −8.1 | −18.3 | 56.8 | −10.2 | 0 | −2.7 |
| 1727 | TCAGAACTGACTTCTGATGA | SEQ ID NO:1276 | −8.1 | −20.4 | 62.2 | −9 | −3.3 | −9 |
| 1733 | CCATTATCAGAACTGACTTC | SEQ ID NO:1277 | −8.1 | −20.8 | 62.5 | −12.2 | −0.1 | −7.6 |
| 1885 | CATGATGATCATGATCACAG | SEQ ID NO:1278 | −8.1 | −19.6 | 59.8 | −8.4 | −2.2 | −14.2 |
| 2011 | CTTGATCGTTCTTTTTGTGT | SEQ ID NO:1279 | −8.1 | −22.2 | 67.7 | −14.1 | 0 | −5.3 |
| 2265 | TAAGGATTTACTAAAAAAAG | SEQ ID NO:1280 | −8.1 | −11.3 | 42.1 | −3.2 | 0 | −2.9 |
| 2266 | ATAAGGATTTACTAAAAAAA | SEQ ID NO:1281 | −8.1 | −11.3 | 42 | −3.2 | 0 | −3.3 |
| 2267 | AATAAGGATTTACTAAAAAA | SEQ ID NO:1282 | −8.1 | −11.3 | 42 | −3.2 | 0 | −3.3 |
| 2295 | TGAGTGGAATAATTATAACT | SEQ ID NO:1283 | −8.1 | −15.8 | 51.4 | −7.7 | 0 | −6.2 |
| 139 | AACATGGTAGTTTAAGTAAG | SEQ ID NO:1284 | −8 | −16.9 | 54.6 | −8.9 | 0 | −5.2 |
| 306 | GCCTTAACTTTTCCTTTCTT | SEQ ID NO:1285 | −8 | −24.1 | 70.5 | −16.1 | 0 | −2.2 |
| 339 | ATATCTTGTTGCTTGTGAAC | SEQ ID NO:1286 | −8 | −20.5 | 63.3 | −12.5 | 0 | −4.1 |
| 710 | GCCTTGTGCCAACTGCTTGC | SEQ ID NO:1287 | −8 | −29.5 | 80.6 | −20.5 | −0.9 | −5.8 |
| 967 | ACGTCCATCCACTACTGCTG | SEQ ID NO:1288 | −8 | −27 | 74.7 | −19 | 0 | −4.4 |
| 1085 | CCTTCTGCATAAATGAACTG | SEQ ID NO:1289 | −8 | −20.1 | 59.4 | −12.1 | 0 | −4.7 |
| 1163 | CCAAATTCACAGTATAGTCA | SEQ ID NO:1290 | −8 | −20.3 | 61.4 | −12.3 | 0 | −3.1 |
| 1412 | TACAGTAACGAAGACCCATC | SEQ ID NO:1291 | −8 | −21.6 | 62.1 | −13.6 | 0 | −3.5 |
| 1488 | ACTCCACAATCTGTCTCCCG | SEQ ID NO:1292 | −8 | −27.4 | 75 | −19.4 | 0 | −2.4 |
| 1575 | ATAAGGGCAAACATCACAAG | SEQ ID NO:1293 | −8 | −18.7 | 56.4 | −10.7 | 0 | −4 |
| 1605 | TCTTGCATGGAGATCCGATC | SEQ ID NO:1294 | −8 | −24.5 | 70.4 | −16 | −0.2 | −6.3 |
| 1618 | CTCTTTGCGTCTTTCTTGCA | SEQ ID NO:1295 | −8 | −25.6 | 75.1 | −16.9 | −0.4 | −4.8 |
| 1650 | AAATCAGGCAGCCGTTTCAA | SEQ ID NO:1296 | −8 | −23.8 | 66.9 | −15 | −0.3 | −9 |
| 1915 | ATTCTGACACTTGGCATAAG | SEQ ID NO:1297 | −8 | −20.8 | 62.6 | −12.3 | −0.2 | −4.1 |
| 2124 | AGATTCCGTGGGAAATCAAC | SEQ ID NO:1298 | −8 | −21.3 | 61.7 | −11.4 | −1.9 | −7.1 |
| 2278 | ACTGATATATAAATAAGGAT | SEQ ID NO:1299 | −8 | −14.2 | 48 | −6.2 | 0 | −4.2 |
| 2296 | TTGAGTGGAATAATTATAAC | SEQ ID NO:1300 | −8 | −15 | 49.9 | −7 | 0 | −6.2 |
| 2402 | AATAGCTAGAATCTTTCTGA | SEQ ID NO:1301 | −8 | −18.7 | 58.8 | −9.8 | −0.7 | −6.8 |
| 2485 | TACCAATTTTTAGAAACATA | SEQ ID NO:1302 | −8 | −15.8 | 50.9 | −7.8 | 0 | −2.9 |
| 2510 | TCTGAATGAAGTATGGTGAA | SEQ ID NO:1303 | −8 | −18.3 | 56.9 | −10.3 | 0 | −2.2 |
| 2574 | AAGTATGAGCATACACTGCC | SEQ ID NO:1304 | −8 | −22.8 | 66.7 | −13.1 | −1.7 | −9.6 |
| 2884 | TTTAAAATCATATTGTCAGT | SEQ ID NO:1305 | −8 | −16.2 | 52.9 | −8.2 | 0 | −4 |
| 2961 | AGGAAATAAAAAACACTTTT | SEQ ID NO:1306 | −8 | −12.9 | 44.9 | −4.2 | −0.4 | −2.9 |
| 3046 | ATAGCAGCTCTGTGTTGTGA | SEQ ID NO:1307 | −8 | −24.5 | 74.2 | −16.5 | 0 | −6.1 |
| 132 | TAGTTTAAGTAAGCAAATAT | SEQ ID NO:1308 | −7.9 | −15.1 | 50.3 | −7.2 | 0 | −4.1 |
| 212 | AATCATATCCTCTGTACTCC | SEQ ID NO:1309 | −7.9 | −23.1 | 68.5 | −15.2 | 0 | −4.8 |
| 299 | CTTTTCCTTTCTTCTTAATA | SEQ ID NO:1310 | −7.9 | −20.2 | 62.7 | −12.3 | 0 | −2.3 |
| 518 | TGCTTTCCAAAAACTTTTTC | SEQ ID NO:1311 | −7.9 | −19.1 | 58 | −11.2 | 0 | −4.9 |
| 942 | TCATCATCTTCCAGAAAGAT | SEQ ID NO:1312 | −7.9 | −20.5 | 62 | −11 | −1.5 | −4.7 |
| 1026 | GTTTGCACAGCTCGTCCGGG | SEQ ID NO:1313 | −7.9 | −29.5 | 80.5 | −21 | −0.3 | −6.9 |
| 1035 | ATCTGGAGTGTTTGCACAGC | SEQ ID NO:1315 | −7.9 | −24.9 | 74.3 | −14.3 | −2.7 | −7.3 |
| 1098 | TGCTCAAATATTTCCTTCTG | SEQ ID NO:1315 | −7.9 | −21 | 63 | −13.1 | 0 | −5.8 |
| 1229 | TTCCACAAGCAATAAGAATC | SEQ ID NO:1316 | −7.9 | −18.5 | 56.3 | −10.6 | 0 | −4.1 |
| 1233 | CTTGTTCCACAAGCAATAAG | SEQ ID NO:1317 | −7.9 | −20.4 | 60.6 | −10.5 | −2 | −6.5 |
| 1518 | ACACCAATCTCAGGACCAGC | SEQ ID NO:1318 | −7.9 | −26 | 72.8 | −18.1 | 0 | −3.7 |
| 1520 | CCACACCAATCTCAGGACCA | SEQ ID NO:1319 | −7.9 | −26.9 | 72.9 | −19 | 0 | −3.7 |
| 1892 | GATCTCTCATGATGATCATG | SEQ ID NO:1320 | −7.9 | −20.6 | 63.4 | −10.3 | −2.4 | −11.1 |
| 1967 | TATCACAAATTACCACAGGC | SEQ ID NO:1321 | −7.9 | −20.9 | 61.4 | −13 | 0 | −3.7 |
| 2137 | CACAGATTTGGCAAGATTCC | SEQ ID NO:1322 | −7.9 | −22.5 | 65.7 | −14.6 | 0 | −4 |
| 2277 | CTGATATATAAATAAGGATT | SEQ ID NO:1323 | −7.9 | −14.1 | 47.8 | −6.2 | 0 | −4.2 |
| 2585 | CCTAACTGTCCAAGTATGAG | SEQ ID NO:1324 | −7.9 | −22.1 | 64.8 | −13.5 | −0.5 | −3.8 |
| 2707 | CTTAGATATAAATCCTACCA | SEQ ID NO:1325 | −7.9 | −19.2 | 58 | −10.4 | −0.7 | −4.2 |
| 3059 | CAATATTAATTTAATAGCAG | SEQ ID NO:1326 | −7.9 | −14.2 | 48 | −5.6 | −0.4 | −7.1 |
| 28 | GGCAATCTGCGGGCTCGGGG | SEQ ID NO:1327 | −7.8 | −30.8 | 81.1 | −20.8 | −2.2 | −8.4 |
| 109 | ACACATGATGCCGGAGACAC | SEQ ID NO:1328 | −7.8 | −24.5 | 68.1 | −16.7 | 0 | −6.7 |
| 211 | ATCATATCCTCTGTACTCCA | SEQ ID NO:1329 | −7.8 | −24.5 | 72.1 | −16.7 | 0 | −4.8 |
| 592 | CCGATTGTCATACATATACT | SEQ ID NO:1330 | −7.8 | −20.9 | 61.8 | −13.1 | 0 | −4.4 |
| 615 | GTAAAGCTGGTATCTTGACT | SEQ ID NO:1331 | −7.8 | −21.4 | 64.9 | −13.6 | 0 | −5.3 |
| 644 | ATTGTTGGATAACTCTCTCC | SEQ ID NO:1332 | −7.8 | −22.3 | 67.2 | −13.4 | −1 | −4.2 |
| 708 | CTTGTGCCAACTGCTTGCCC | SEQ ID NO:1333 | −7.8 | −29.7 | 79.7 | −21.4 | −0.2 | −4.6 |
| 1216 | AAGAATCAAACGCCGGCATC | SEQ ID NO:1334 | −7.8 | −22.6 | 62.2 | −13.1 | 0 | −11.6 |
| 1607 | TTTCTTGCATGGAGATCCGA | SEQ ID NO:1335 | −7.8 | −24.3 | 69.6 | −16 | −0.2 | −6.1 |
| 1630 | TCCAAGCATGATCTCTTTGC | SEQ ID NO:1336 | −7.8 | −24.1 | 70.5 | −16.3 | 0.2 | −5.1 |
| 1801 | GTGCATATAAGTAATTTCTT | SEQ ID NO:1337 | −7.8 | −18.2 | 57.7 | −9.9 | −0.2 | −6.1 |
| 1830 | TTCAATTCACCAGCAAGGAT | SEQ ID NO:1338 | −7.8 | −22.2 | 64.6 | −13.6 | −0.6 | −4.9 |
| 2071 | CAGCAACTGTAAAGGGATCA | SEQ ID NO:1339 | −7.8 | −21.2 | 62.5 | −12 | −1.3 | −6.6 |
| 2076 | AAAGCCAGCAACTGTAAAGG | SEQ ID NO:1340 | −7.8 | −20.7 | 60.1 | −11.5 | −1.3 | −6.9 |
| 2225 | AAATCAAGGTTTTAAATACA | SEQ ID NO:1341 | −7.8 | −14.6 | 48.6 | −6.8 | 0 | −5.4 |
| 2226 | TAAATCAAGGTTTTAAATAC | SEQ ID NO:1342 | −7.8 | −13.6 | 46.8 | −5.8 | 0 | −4.5 |
| 2482 | CAATTTTTAGAAACATATTG | SEQ ID NO:1343 | −7.8 | −14 | 47.6 | −6.2 | 0 | −2.9 |
| 2619 | ATCACATCTTCTCTTAPAAC | SEQ ID NO:1344 | −7.8 | −17.9 | 56.6 | −10.1 | 0 | −2.3 |
| 2763 | ATTTCTTCCACCTACAGATA | SEQ ID NO:1345 | −7.8 | −22.7 | 67 | −14.9 | 0 | −2.4 |
| 2780 | AATATTTCGCTTCCTAAATT | SEQ ID NO:1346 | −7.8 | −18.9 | 57.1 | −11.1 | 0 | −3.8 |
| 300 | ACTTTTCCTTTCTTCTTAAT | SEQ ID NO:1347 | −7.7 | −20.7 | 63.9 | −13 | 0 | −2.3 |
| 503 | TTTTCAAGTCTTTGTAGTTG | SEQ ID NO:1348 | −7.7 | −19.6 | 62.8 | −11.2 | −0.5 | −3.3 |
| 835 | TGTGCTGTCCACACGAGAGA | SEQ ID NO:1349 | −7.7 | −25.9 | 73.4 | −16.4 | −1.8 | −7.2 |
| 1019 | CAGCTCGTCCGGGGTGATCT | SEQ ID NO:1350 | −7.7 | −29.7 | 81.3 | −22 | 0 | −6.6 |
| 1228 | TCCACAAGCAATAAGAATCA | SEQ ID NO:1351 | −7.7 | −19.1 | 57.2 | −11.4 | 0 | −4.1 |
| 1413 | TTACAGTAACGAAGACCCAT | SEQ ID NO:1352 | −7.7 | −21.3 | 61.1 | −13.6 | 0 | −4.5 |
| 1509 | TCAGGACCAGCATTAATATG | SEQ ID NO:1353 | −7.7 | −21.1 | 62.6 | −13.4 | 0 | −4.2 |
| 1516 | ACCAATCTCAGGACCAGCAT | SEQ ID NO:1354 | −7.7 | −25.8 | 72.2 | −18.1 | 0 | −4.1 |
| 1757 | AAGTAGCATAATGATAGCCT | SEQ ID NO:1355 | −7.7 | −20.7 | 62 | −13 | 0.4 | −3.9 |
| 1970 | CCTTATCACAAATTACCACA | SEQ ID NO:1356 | −7.7 | −20.9 | 60.7 | −13.2 | 0 | −3.2 |
| 2305 | AATCACATATTGAGTGGAAT | SEQ ID NO:1357 | −7.7 | −18 | 56.2 | −9.4 | −0.7 | 4.7 |
| 2548 | TTTAGATACTCCAATTAAAT | SEQ ID NO:1358 | −7.7 | −16.1 | 51.9 | −8.4 | 0 | −3 |
| 2583 | TAACTGTCCAAGTATGAGCA | SEQ ID NO:1359 | −7.7 | −21.7 | 64.4 | −13.3 | −0.5 | −5 |
| 2799 | CCCACCAATGCACTACTGTA | SEQ ID NO:1360 | −7.7 | −26.2 | 71.4 | −18.5 | 0 | −5.5 |
| 2838 | TTGTGCTATAAAATTGTGCA | SEQ ID NO:1361 | −7.7 | −19.1 | 58.4 | −10.6 | −0.6 | −5.2 |
| 2919 | TAGGATACCCAACATGTACA | SEQ ID NO:1362 | −7.7 | −22.1 | 63.8 | −13.3 | −1 | −8.1 |
| 2970 | ACAGATACAAGGAAATAAAA | SEQ ID NO:1363 | −7.7 | −13.4 | 45.7 | −5.7 | 0 | −1.3 |
| 3053 | TAATTTAATAGCAGCTCTGT | SEQ ID NO:1364 | −7.7 | −19.6 | 60.7 | −11.9 | 0 | −6.1 |
| 124 | GTAAGCAAATATACCACACA | SEQ ID NO:1365 | −7.6 | −19.4 | 57.9 | −11.8 | 0 | −4.1 |
| 172 | TAGGGTCTCCAGGATTTCTC | SEQ ID NO:1366 | −7.6 | −25.4 | 76.5 | −16.6 | −1.1 | −5.4 |
| 519 | TTGCTTTCCAAAAACTTTTT | SEQ ID NO:1367 | −7.6 | −18.8 | 57.1 | −11.2 | 0 | −4.7 |
| 642 | TGTTGGATAACTCTCTCCAC | SEQ ID NO:1368 | −7.6 | −23.1 | 68.6 | −14.2 | −1.2 | −5.3 |
| 671 | TAAACACAAGTGCAAAAGCA | SEQ ID NO:1369 | −7.6 | −17.5 | 53.5 | −9.3 | −0.3 | −5.8 |
| 672 | TTAAACACAAGTGCAAAAGC | SEQ ID NO:1370 | −7.6 | −16.9 | 52.6 | −9.3 | 0 | −5.4 |
| 1000 | TCCTGCAGTTCGTTTAATTC | SEQ ID NO:1371 | −7.6 | −23.2 | 68.8 | −15.1 | 0 | −8.2 |
| 1515 | CCAATCTCAGGACCAGCATT | SEQ ID NO:1372 | −7.6 | −25.7 | 72 | −18.1 | 0 | −4.1 |
| 2268 | AAATAAGGATTTACTAAAAA | SEQ ID NO:1373 | −7.6 | −11.3 | 42 | −3.2 | −0.2 | −4 |
| 2318 | GTAACTTCACAAAAATCACA | SEQ ID NO:1374 | −7.6 | −16.6 | 52.4 | −9 | 0 | −1.9 |
| 2406 | AAATAATAGCTAGAATCTTT | SEQ ID NO:1375 | −7.6 | −15.1 | 50.1 | −7.5 | 0 | −6.3 |
| 2680 | TTTTCAGTTTTAAGTTTTAC | SEQ ID NO:1376 | −7.6 | −17.3 | 57 | −9.7 | 0 | −2.6 |
| 3 | GGTGGCGCCGACACGACTCC | SEQ ID NO:1377 | −7.5 | −31.4 | 79.9 | −21.8 | −1.6 | −12.1 |
| 115 | TATACCACACATGATGCCGG | SEQ ID NO:1378 | −7.5 | −24.5 | 67.2 | −17 | 0 | −6.4 |
| 588 | TTGTCATACATATACTTAAC | SEQ ID NO:1379 | −7.5 | −16.8 | 54.4 | −9.3 | 0 | −2.9 |
| 643 | TTGTTGGATAACTCTCTCCA | SEQ ID NO:1380 | −7.5 | −23 | 68.4 | −14.4 | −1 | −5.3 |
| 1084 | CTTCTGCATAAATGAACTGA | SEQ ID NO:1381 | −7.5 | −18.7 | 57 | −11.2 | 0 | −4.9 |
| 1293 | ATCACAGGCAACTCAGTCAG | SEQ ID NO:1382 | −7.5 | −23.5 | 69.9 | −15.2 | −0.6 | −4 |
| 1420 | TCTCTCCTTACAGTAACGAA | SEQ ID NO:1383 | −7.5 | −21.7 | 64 | −14.2 | 0 | −4.7 |
| 1487 | CTCCACAATCTGTCTCCCGT | SEQ ID NO:1384 | −7.5 | −28.4 | 77.7 | −20.9 | 0 | −2.6 |
| 1501 | AGCATTAATATGAACTCCAC | SEQ ID NO:1385 | −7.5 | −19.6 | 59.1 | −11.4 | −0.4 | −4.2 |
| 1502 | CAGCATTAATATGAACTCCA | SEQ ID NO:1386 | −7.5 | −20.1 | 59.8 | −11.9 | −0.4 | −4.2 |
| 1600 | CATGGAGATCCGATCATCAC | SEQ ID NO:1387 | −7.5 | −23.3 | 66.9 | −14.9 | −0.7 | −7.5 |
| 1648 | ATCAGGCAGCCGTTTCAATC | SEQ ID NO:1388 | −7.5 | −25.6 | 72.9 | −17.3 | −0.3 | −9 |
| 1813 | GATGCCTTCAGAGTGCATAT | SEQ ID NO:1389 | −7.5 | −24.5 | 71.7 | −14.2 | −2.8 | −6.9 |
| 1916 | CATTCTGACACTTGGCATAA | SEQ ID NO:1390 | −7.5 | −21.5 | 63.6 | −14 | 0 | −4 |
| 2136 | ACAGATTTGGCAAGATTCCG | SEQ ID NO:1391 | −7.5 | −22.6 | 64.8 | −14.6 | −0.1 | −4 |
| 2269 | TAAATAAGGATTTACTAAAA | SEQ ID NO:1392 | −7.5 | −11.7 | 42.9 | −3.2 | −0.8 | −5.2 |
| 2340 | AATTACTGGGAAAATGTAAG | SEQ ID NO:1393 | −7.5 | −15.3 | 49.8 | −7.2 | −0.3 | −4.1 |
| 2444 | GAGGGTCCAGAAATGCAACA | SEQ ID NO:1394 | −7.5 | −23.2 | 66 | −14.6 | −1 | −5.6 |
| 2765 | AAATTTCTTCCACCTACAGA | SEQ ID NO:1395 | −7.5 | −21.6 | 63.3 | −14.1 | 0 | −4.3 |
| 506 | ACTTTTTCAAGTCTTTGTAG | SEQ ID NO:1396 | −7.4 | −19.5 | 62.2 | −11.2 | −0.8 | −3.8 |
| 574 | CTTAACGAGCTTGGCAATTG | SEQ ID NO:1397 | −7.4 | −21.5 | 62.3 | −13.2 | −0.7 | −6.3 |
| 614 | TAAAGCTGGTATCTTGACTT | SEQ ID NO:1398 | −7.4 | −20.3 | 62 | −12.9 | 0 | −5.3 |
| 709 | CCTTGTGCCAACTGCTTGCC | SEQ ID NO:1399 | −7.4 | −29.7 | 79.7 | −21.3 | −0.9 | −4.6 |
| 945 | ACATCATCATCTTCCAGAAA | SEQ ID NO:1400 | −7.4 | −20.8 | 62.2 | −13.4 | 0 | −2.9 |
| 1394 | TCAAAGTATCTGCTGTCTCA | SEQ ID NO:1401 | −7.4 | −22.2 | 67.7 | −14.8 | 0 | −3.6 |
| 2337 | TACTGGGAAAATGTAAGAGG | SEQ ID NO:1402 | −7.4 | −17.7 | 54.9 | −10.3 | 0 | −2.7 |
| 2351 | AGTCCTCCACAAATTACTGG | SEQ ID NO:1403 | −7.4 | −23.2 | 66.8 | −15.8 | 0 | −5.3 |
| 2365 | ATTCCATTATTAAAGTCCT | SEQ ID NO:1404 | −7.4 | −21.3 | 63.5 | −13.9 | 0 | −1.6 |
| 2662 | ACAGTTTGATTTAAAAACAA | SEQ ID NO:1405 | −7.4 | −14.2 | 47.7 | −5.1 | −1.7 | −6.9 |
| 2677 | TCAGTTTTAAGTTTTACAGT | SEQ ID NO:1406 | −7.4 | −18.9 | 60.8 | −11.5 | 0 | −2.6 |
| 2697 | AATCCTACCAATAAAATTTT | SEQ ID NO:1407 | −7.4 | −16.4 | 51.4 | −9 | 0 | −6.5 |
| 2708 | ACTTAGATATAAATCCTACC | SEQ ID NO:1408 | −7.4 | −18.7 | 57.3 | −10.4 | −0.7 | −3.4 |
| 2781 | TAATATTTCGCTTCCTAAAT | SEQ ID NO:1409 | −7.4 | −18.5 | 56.3 | −11.1 | 0 | −4.2 |
| 2947 | ACTTTTAGGAGATGAAAACA | SEQ ID NO:1410 | −7.4 | −16.9 | 53.5 | −9.5 | 0 | −3 |
| 2967 | GATACAAGGAAATAAAAAAC | SEQ ID NO:1411 | −7.4 | −11.3 | 41.8 | −3.9 | 0 | −1.3 |
| 3000 | ATTCAGCAGTCATTTAAAAA | SEQ ID NO:1412 | −7.4 | −17.1 | 54.3 | −9.7 | 0 | −5 |
| 110 | CACACATGATGCCGGAGACA | SEQ ID NO:1413 | −7.3 | −25 | 68.6 | −17.7 | 0 | −6.7 |
| 237 | CCTCCATCAAATCCCACACC | SEQ ID NO:1415 | −7.3 | −27.9 | 73.4 | −20.6 | 0 | −1.1 |
| 460 | GATAAATTCATTATTTTTAT | SEQ ID NO:1415 | −7.3 | −14 | 48.1 | −6 | −0.5 | −5.9 |
| 468 | TGAATAACGATAAATTCATT | SEQ ID NO:1416 | −7.3 | −14.1 | 47.2 | −5.3 | −1.4 | −5.3 |
| 645 | AATTGTTGGATAACTCTCTC | SEQ ID NO:1417 | −7.3 | −19.6 | 61.1 | −11.2 | −1 | −4.4 |
| 769 | AATGTGATCAGTAGAAAGTT | SEQ ID NO:1418 | −7.3 | −17.6 | 56.1 | −10.3 | 0 | −6.6 |
| 810 | CAGCTTCCTTTCTTGTCTTT | SEQ ID NO:1419 | −7.3 | −25.1 | 75.4 | −17.8 | 0 | −4.5 |
| 815 | GATTGCAGCTTCCTTTCTTG | SEQ ID NO:1420 | −7.3 | −24.9 | 73.3 | −17.6 | 0 | −5.2 |
| 873 | TACTCCACTGCTTTTTCTTC | SEQ ID NO:1421 | −7.3 | −23.9 | 71.7 | −16.6 | 0 | −3.6 |
| 1037 | CCATCTGGAGTGTTTGCACA | SEQ ID NO:1422 | −7.3 | −25.8 | 74.4 | −15.8 | −2.7 | −8.8 |
| 1099 | CTGCTCAAATATTTCCTTCT | SEQ ID NO:1423 | −7.3 | −21.9 | 65.1 | −14.6 | 0 | −6 |
| 1694 | CTAGTTTCTGAATTTCGTCA | SEQ ID NO:1424 | −7.3 | −20.9 | 64 | −13.6 | 0 | −5 |
| 1715 | TCTGATGATAAAGTTCTGTT | SEQ ID NO:1425 | −7.3 | −18.7 | 59 | −11.4 | 0 | −2.5 |
| 1732 | CATTATCAGAACTGACTTCT | SEQ ID NO:1426 | −7.3 | −19.7 | 60.7 | −11.6 | −0.6 | −7.1 |
| 1825 | TTCACCAGCAAGGATGCCTT | SEQ ID NO:1427 | −7.3 | −26.5 | 73.7 | −17 | −2.2 | −5.9 |
| 2133 | GATTTGGCAAGATTCCGTGG | SEQ ID NO:1428 | −7.3 | −24.1 | 68.3 | −16.8 | 0.6 | −4 |
| 2279 | AACTGATATATAAATAAGGA | SEQ ID NO:1429 | −7.3 | −13.5 | 46.4 | −6.2 | 0 | −4 |
| 2366 | GATTCCATTATTCAAAGTCC | SEQ ID NO:1430 | −7.3 | −21 | 62.9 | −13.7 | 0 | −1.9 |
| 2443 | AGGGTCCAGAAATGCAACAC | SEQ ID NO:1431 | −7.3 | −22.8 | 65.3 | −14.4 | −1 | −5.6 |
| 2816 | TATGTTAAGGATTGAGACCC | SEQ ID NO:1432 | −7.3 | −21.3 | 63.1 | −14 | 0 | −3.2 |
| 3002 | TCATTCAGCAGTCATTTAAA | SEQ ID NO:1433 | −7.3 | −19.6 | 60.8 | −12.3 | 0 | −4.6 |
| 40 | CGAGCTTCGGTGGGCAATCT | SEQ ID NO:1434 | −7.2 | −27.3 | 74.9 | −19.2 | −0.8 | −5.8 |
| 200 | TGTACTCCAGTCTCTGAAGG | SEQ ID NO:1435 | −7.2 | −24 | 71.7 | −16.2 | −0.3 | −5.2 |
| 623 | CCAAGGTAGTAAAGCTGGTA | SEQ ID NO:1436 | −7.2 | −22.4 | 65.8 | −15.2 | 0 | −5.1 |
| 707 | TTGTGCCAACTGCTTGCCCG | SEQ ID NO:1437 | −7.2 | −29.6 | 77.6 | −21.4 | −0.9 | −4.4 |
| 872 | ACTCCACTGCTTTTTCTTCC | SEQ ID NO:1438 | −7.2 | −26.2 | 76.1 | −19 | 0 | −3.6 |
| 1097 | GCTCAAATATTTCCTTCTGC | SEQ ID NO:1439 | −7.2 | −22.8 | 67.3 | −15.6 | 0 | −6 |
| 1170 | AAACCACCCAAATTCACAGT | SEQ ID NO:1440 | −7.2 | −22.3 | 62.3 | −15.1 | 0 | −3.1 |
| 1263 | ACTTGACGTGTTGCTACACC | SEQ ID NO:1441 | −7.2 | −24.8 | 70.7 | −15.5 | −2.1 | −5.6 |
| 1280 | CAGTCAGCTCCTCAAGAACT | SEQ ID NO:1442 | −7.2 | −24.4 | 71.1 | −17.2 | 0 | −4.2 |
| 1508 | CAGGACCAGCATTAATATGA | SEQ ID NO:1443 | −7.2 | −21.3 | 62.5 | −13.4 | −0.4 | −4.2 |
| 1632 | AATCCAAGCATGATCTCTTT | SEQ ID NO:1444 | −7.2 | −21.6 | 64.1 | −14.4 | 0 | −4.9 |
| 1719 | GACTTCTGATGATAAAGTTC | SEQ ID NO:1445 | −7.2 | −18.3 | 57.9 | −10.2 | −0.7 | −4 |
| 1754 | TAGCATAATGATAGCCTCGT | SEQ ID NO:1446 | −7.2 | −22.6 | 65.6 | −14.9 | −0.1 | −4.1 |
| 1820 | CAGCAAGGATGCCTTCAGAG | SEQ ID NO:1447 | −7.2 | −24.8 | 71 | −15.4 | −2.2 | −6.7 |
| 1901 | CATAAGTGTGATCTCTCATG | SEQ ID NO:1448 | −7.2 | −20.4 | 63.1 | −12.5 | −0.4 | −4.9 |
| 2013 | ACCTTGATCGTTCTTTTTGT | SEQ ID NO:1449 | −7.2 | −23.2 | 68.9 | −16 | 0 | −4.6 |
| 2087 | CAGCAAGGTGGAAAGCCAGC | SEQ ID NO:1450 | −7.2 | −25.6 | 71.3 | −18.4 | 3.5 | −6.5 |
| 2130 | TTGGCAAGATTCCGTGGGAA | SEQ ID NO:1451 | −7.2 | −24.5 | 68.3 | −16 | −1.2 | −6.4 |
| 2135 | CAGATTTGGCAAGATTCCGT | SEQ ID NO:1452 | −7.2 | −23.6 | 67.3 | −15.9 | −0.1 | −4 |
| 2224 | AATCAAGGTTTTAAATACAA | SEQ ID NO:1453 | −7.2 | −14.6 | 48.6 | −7.4 | 0 | −5.4 |
| 2339 | ATTACTGGGAAAATGTAAGA | SEQ ID NO:1454 | −7.2 | −16.6 | 52.7 | −8.8 | −0.3 | −4.1 |
| 2533 | TAAATGCACTACTCTTTCAC | SEQ ID NO:1455 | −7.2 | −19.5 | 59.9 | −12.3 | 0 | −5.5 |
| 2881 | AAAATCATATTGTCAGTTGT | SEQ ID NO:1456 | −7.2 | −17.6 | 56.1 | −10.4 | 0 | −2.1 |
| 2953 | AAAAACACTTTTAGGAGATG | SEQ ID NO:1457 | −7.2 | −15.6 | 50.6 | −7.8 | −0.3 | −3 |
| 3054 | TTAATTTAATAGCAGCTCTG | SEQ ID NO:1458 | −7.2 | −18.5 | 57.9 | −11.3 | 0 | −6.1 |
| 104 | TGATGCCGGAGACACGGCCC | SEQ ID NO:1459 | −7.1 | −30.5 | 77.7 | −19.3 | −4.1 | −10.6 |
| 450 | TTATTTTTATCAGAGCGCTG | SEQ ID NO:1460 | −7.1 | −20.9 | 63.2 | −12.8 | −0.8 | −9.4 |
| 617 | TAGTAAAGCTGGTATCTTGA | SEQ ID NO:1461 | −7.1 | −20 | 61.9 | −12.9 | 0 | −5.1 |
| 958 | CACTACTGCTGCAACATCAT | SEQ ID NO:1462 | −7.1 | −23.1 | 66.8 | −16 | 0 | −7.3 |
| 1395 | ATCAAAGTATCTGCTGTCTC | SEQ ID NO:1463 | −7.1 | −21.5 | 66.4 | −14.4 | 0 | −3.6 |
| 1601 | GCATGGAGATCCGATCATCA | SEQ ID NO:1464 | −7.1 | −24.9 | 70.5 | −16.9 | −0.7 | −7.5 |
| 1700 | CTGTTGCTAGTTTCTGAATT | SEQ ID NO:1465 | −7.1 | −21.3 | 65.5 | −14.2 | 0 | −4.7 |
| 1709 | GATAAAGTTCTGTTGCTAGT | SEQ ID NO:1466 | −7.1 | −20.4 | 63.5 | −13.3 | 0 | −4.1 |
| 1955 | CCACAGGCCGCCCCTGCCGA | SEQ ID NO:1467 | −7.1 | −37.3 | 88.1 | −27.4 | −2.8 | −9 |
| 2139 | GTCACAGATTTGGCAAGATT | SEQ ID NO:1468 | −7.1 | −21.7 | 65.1 | −14.6 | 0 | −4.1 |
| 2270 | ATAAATAAGGATTTACTAAA | SEQ ID NO:1469 | −7.1 | −12.4 | 44.3 | −3.9 | −1.3 | −5 |
| 2304 | ATCACATATTGAGTGGAATA | SEQ ID NO:1470 | −7.1 | −18.4 | 57.5 | −10.4 | −0.7 | −5 |
| 2456 | CAGATTGAAGTGGAGGGTCC | SEQ ID NO:1471 | −7.1 | −24.3 | 71 | −16.5 | −0.4 | −3.5 |
| 2847 | ATTTAAAGTTTGTGCTATAA | SEQ ID NO:1472 | −7.1 | −16.5 | 53.5 | −9.4 | 0 | −4.9 |
| 3003 | GTCATTCAGCAGTCATTTAA | SEQ ID NO:1473 | −7.1 | −21.5 | 66.3 | −14.4 | 0 | −4.1 |
| 73 | GGCGAGTGGCTGGCGGGATC | SEQ ID NO:1474 | −7 | −30.7 | 82.7 | −22 | −1.7 | −6.5 |
| 144 | CGAGGAACATGGTAGTTTAA | SEQ ID NO:1475 | −7 | −19.9 | 59.7 | −12.9 | 0 | −5.2 |
| 150 | CTCGTTCGAGGAACATGGTA | SEQ ID NO:1476 | −7 | −23.3 | 66.8 | −14.4 | −1.9 | −8.1 |
| 257 | CTTCCCAATCTTTATCATTG | SEQ ID NO:1477 | −7 | −21.8 | 64.4 | −14.8 | 0 | −3.3 |
| 711 | CGCCTTGTGCCAACTGCTTG | SEQ ID NO:1478 | −7 | −28.5 | 76.1 | −20.5 | −0.9 | −6.1 |
| 836 | TTGTGCTGTCCACACGAGAG | SEQ ID NO:1479 | −7 | −25.4 | 72.4 | −16.4 | −2 | −7.2 |
| 1188 | TCCTTTATGTGATCCTTCAA | SEQ ID NO:1480 | −7 | −22.8 | 67.3 | −15.1 | −0.5 | −5.5 |
| 1206 | CGCCGGCATCTCTGGATCTC | SEQ ID NO:1481 | −7 | −29.2 | 79.4 | −20.6 | −0.9 | −11.3 |
| 1860 | AATTTATCCACCAAAGCCAG | SEQ ID NO:1482 | −7 | −22.3 | 63 | −15.3 | 0 | −3.2 |
| 2367 | AGATTCCATTATTCAAAGTC | SEQ ID NO:1483 | −7 | −19 | 59.3 | −12 | 0 | −2.6 |
| 2506 | AATGAAGTATGGTGAAACAA | SEQ ID NO:1484 | −7 | −15.9 | 50.9 | −7.9 | −0.9 | −3.9 |
| 2535 | ATTAAATGCACTACTCTTTC | SEQ ID NO:1485 | −7 | −18.7 | 58.4 | −11.7 | 0 | −5.5 |
| 2778 | TATTTCGCTTCCTAAATTTC | SEQ ID NO:1486 | −7 | −20.1 | 60.7 | −13.1 | 0 | −4.9 |
| 2815 | ATGTTAAGGATTGAGACCCA | SEQ ID NO:1487 | −7 | −22.3 | 64.9 | −14.8 | −0.2 | −3.4 |
| 2917 | GGATACCCAACATGTACACA | SEQ ID NO:1488 | −7 | −23.3 | 65.8 | −15.8 | −0.2 | −7.1 |
| 2971 | TACAGATACAAGGAAATAAA | SEQ ID NO:1489 | −7 | −13.8 | 46.7 | −6.8 | 0 | −1.2 |
| 201 | CTGTACTCCAGTCTCTGAAG | SEQ ID NO:1490 | −6.9 | −23.7 | 71 | −16.2 | −0.3 | −5.2 |
| 572 | TAACGAGCTTGGCAATTGTC | SEQ ID NO:1491 | −6.9 | −22.1 | 64.4 | −14.3 | −0.7 | −7.5 |
| 616 | AGTAAAGCTGGTATCTTGAC | SEQ ID NO:1492 | −6.9 | −20.5 | 63.1 | −13.6 | 0 | −4.6 |
| 1327 | GTTTCTGTCCAGGAAGTCAC | SEQ ID NO:1493 | −6.9 | −24.6 | 73.9 | −17.2 | −0.1 | −5.5 |
| 1334 | CTGGTGTGTTTCTGTCCAGG | SEQ ID NO:1494 | −6.9 | −26.7 | 79.3 | −18.3 | −1.4 | −5.5 |
| 1445 | TTGTGATCCCCACAGTTAAA | SEQ ID NO:1495 | −6.9 | −23.5 | 66.8 | −14.5 | −2.1 | −10.8 |
| 1458 | CTGCCAACTGTGTTTGTGAT | SEQ ID NO:1496 | −6.9 | −24.2 | 70.1 | −17.3 | 0 | −3.3 |
| 1604 | CTTGCATGGAGATCCGATCA | SEQ ID NO:1497 | −6.9 | −24.8 | 69.9 | −17 | −0.7 | −7.5 |
| 1690 | TTTCTGAATTTCGTCATCCA | SEQ ID NO:1498 | −6.9 | −22.2 | 65.6 | −15.3 | 0 | −4.7 |
| 1763 | CAAGACAAGTAGCATAATGA | SEQ ID NO:1499 | −6.9 | −17.8 | 55.3 | −10.9 | 0 | −4.1 |
| 1802 | AGTGCATATAAGTAATTTCT | SEQ ID NO:1500 | −6.9 | −18.1 | 57.6 | −10.7 | −0.2 | −6.1 |
| 2826 | ATTGTGCAAATATGTTAAGG | SEQ ID NO:1501 | −6.9 | −17.6 | 55.3 | −10.7 | 0 | −6.1 |
| 2906 | ATGTACACATCCCATCTTCA | SEQ ID NO:1502 | −6.9 | −24.3 | 70.4 | −17.4 | 0 | −6.7 |
| 2907 | CATGTACACATCCCATCTTC | SEQ ID NO:1503 | −6.9 | −24.3 | 70.4 | −17.4 | 0 | −6.7 |
| 2913 | ACCCAACATGTACACATCCC | SEQ ID NO:1504 | −6.9 | −26.2 | 71 | −19.3 | 0 | −6.7 |
| 2941 | AGGAGATGAAAACACAAAGT | SEQ ID NO:1505 | −6.9 | −16.5 | 52 | −9.6 | 0 | −2.8 |
| 44 | CACACGAGCTTCGGTGGGCA | SEQ ID NO:1506 | −6.8 | −28.5 | 77 | −19.4 | −2.3 | −9.5 |
| 258 | GCTTCCCAATCTTTATCATT | SEQ ID NO:1507 | −6.8 | −23.6 | 68.7 | −16.8 | 0 | −2.8 |
| 472 | ATTGTGAATAACGATAAATT | SEQ ID NO:1508 | −6.8 | −14.2 | 47.4 | −6.8 | −0.3 | −3.5 |
| 562 | GGCAATTGTCTCTGTGTCTG | SEQ ID NO:1509 | −6.8 | −24.6 | 74 | −17.3 | 0 | −7.6 |
| 612 | AAGCTGGTATCTTGACTTTC | SEQ ID NO:1510 | −6.8 | −21.8 | 66.8 | −15 | 0 | −5.3 |
| 883 | AGCAAAGTAATACTCCACTG | SEQ ID NO:1511 | −6.8 | −20.3 | 60.6 | −13.5 | 0 | −5.1 |
| 1027 | TGTTTGCACAGCTCGTCCGG | SEQ ID NO:1512 | −6.8 | −28.3 | 77.7 | −21 | −0.1 | −6.1 |
| 1289 | CAGGCAACTCAGTCAGCTCC | SEQ ID NO:1513 | −6.8 | −27.3 | 78.5 | −19.6 | −0.8 | −5.8 |
| 1422 | CCTCTCTCCTTACAGTAACG | SEQ ID NO:1515 | −6.8 | −24.7 | 70.4 | −17.9 | 0 | −4.7 |
| 1712 | GATGATAAAGTTCTGTTGCT | SEQ ID NO:1515 | −6.8 | −20.1 | 61.8 | −13.3 | 0 | −3.6 |
| 1753 | AGCATAATGATAGCCTCGTC | SEQ ID NO:1516 | −6.8 | −23.3 | 67.7 | −16 | −0.1 | −4.1 |
| 1889 | CTCTCATGATGATCATGATC | SEQ ID NO:1517 | −6.8 | −20.6 | 63.4 | −10.3 | −3.5 | −11.3 |
| 1949 | GCCGCCCCTGCCGAGCAACC | SEQ ID NO:1518 | −6.8 | −36.5 | 86.5 | −28.6 | −1 | −7.1 |
| 2188 | CTTAATCATACAGTTTCGTA | SEQ ID NO:1519 | −6.8 | −19.2 | 59.5 | −12.4 | 0 | −3.1 |
| 2509 | CTGAATGAAGTATGGTGAAA | SEQ ID NO:1520 | −6.8 | −17.2 | 53.9 | −10.4 | 0 | −1.3 |
| 2540 | CTCCAATTAAATGCACTACT | SEQ ID NO:1521 | −6.8 | −20.1 | 59.5 | −13.3 | 0 | −5.5 |
| 2549 | CTTTAGATACTCCAATTAAA | SEQ ID NO:1522 | −6.8 | −17 | 53.7 | −10.2 | 0 | −3 |
| 2593 | AACCCTTCCCTAACTGTCCA | SEQ ID NO:1523 | −6.8 | −28.2 | 75.2 | −21.4 | 0 | −3.2 |
| 2800 | ACCCACCAATGCACTACTGT | SEQ ID NO:1524 | −6.8 | −26.7 | 72.5 | −19.9 | 0 | −5.5 |
| 2837 | TGTGCTATAAAATTGTGCAA | SEQ ID NO:1525 | −6.8 | −18.3 | 56.2 | −10.6 | −0.8 | −5.7 |
| 2885 | ATTTAAAATCATATTGTCAG | SEQ ID NO:1526 | −6.8 | −15 | 50.1 | −8.2 | 0 | −5 |
| 2918 | AGGATACCCAACATGTACAC | SEQ ID NO:1527 | −6.8 | −22.6 | 64.9 | −14.7 | −1 | −8.1 |
| 68 | GTGGCTGGCGGGATCGGGGG | SEQ ID NO:1528 | −6.7 | −31.9 | 84.3 | −24.3 | −0.7 | −6.3 |
| 218 | CAGCAGAATCATATCCTCTG | SEQ ID NO:1529 | −6.7 | −22.5 | 66.5 | −14.9 | −0.8 | −4.4 |
| 297 | TTTCCTTTCTTCTTAATAAG | SEQ ID NO:1530 | −6.7 | −18.5 | 58.5 | −11.8 | 0 | −4.8 |
| 520 | TTTGCTTTCCAAAAACTTTT | SEQ ID NO:1531 | −6.7 | −18.8 | 57.1 | −11.2 | −0.8 | −4.1 |
| 593 | CCCGATTGTCATACATATAC | SEQ ID NO:1532 | −6.7 | −22 | 63.6 | −15.3 | 0 | −4.4 |
| 670 | AAACACAAGTGCAAAAGCAC | SEQ ID NO:1533 | −6.7 | −18 | 54.4 | −9.3 | −2 | −8.6 |
| 1083 | TTCTGCATAAATGAACTGAA | SEQ ID NO:1534 | −6.7 | −17.1 | 53.5 | −10.4 | 0 | −4.9 |
| 1174 | CTTCAAACCACCCAAATTCA | SEQ ID NO:1535 | −6.7 | −22.3 | 62.2 | −15.6 | 0 | −3.1 |
| 1281 | TCAGTCAGCTCCTCAAGAAC | SEQ ID NO:1536 | −6.7 | −23.9 | 70.7 | −17.2 | 0 | −4.4 |
| 1407 | TAACGAAGACCCATCAAAGT | SEQ ID NO:1537 | −6.7 | −20.3 | 58.5 | −12.9 | −0.4 | −3.9 |
| 1408 | GTAACGAAGACCCATCAAAG | SEQ ID NO:1538 | −6.7 | −20.3 | 58.5 | −12.9 | −0.4 | −3.9 |
| 1491 | TGAACTCCACAATCTGTCTC | SEQ ID NO:1539 | −6.7 | −22.5 | 66.7 | −15.8 | 0 | −2.6 |
| 1636 | TTTCAATCCAAGCATGATCT | SEQ ID NO:1540 | −6.7 | −21.4 | 63.4 | −14.7 | 0 | −4.9 |
| 1734 | CCCATTATCAGAACTGACTT | SEQ ID NO:1541 | −6.7 | −22.4 | 64.8 | −15.2 | −0.1 | −7.6 |
| 1812 | ATGCCTTCAGAGTGCATATA | SEQ ID NO:1542 | −6.7 | −23.6 | 69.7 | −14.7 | −2.2 | −6.2 |
| 1961 | AAATTACCACAGGCCGCCCC | SEQ ID NO:1543 | −6.7 | −29.8 | 75.1 | −22.6 | −0.2 | −7.7 |
| 2364 | TTCCATTATTCAAAGTCCTC | SEQ ID NO:1544 | −6.7 | −21.7 | 65 | −15 | 0 | −1.6 |
| 2584 | CTAACTGTCCAAGTATGAGC | SEQ ID NO:1545 | −6.7 | −21.9 | 65.2 | −14.5 | −0.5 | −3.7 |
| 2595 | CAAACCCTTCCCTAACTGTC | SEQ ID NO:1546 | −6.7 | −25.5 | 69.7 | −18.8 | 0 | −3.2 |
| 2608 | TCTTAAAACTTGGCAAACCC | SEQ ID NO:1547 | −6.7 | −20.7 | 59.6 | −13.3 | −0.5 | −4 |
| 2999 | TTCAGCAGTCATTTAAAAAA | SEQ ID NO:1548 | −6.7 | −16.4 | 52.5 | −9.7 | 0 | −5 |
| 3057 | ATATTAATTTAATAGCAGCT | SEQ ID NO:1549 | −6.7 | −16.9 | 54.2 | −9.5 | −0.4 | −7.1 |
| 3058 | AATATTAATTTAATAGCAGC | SEQ ID NO:1550 | −6.7 | −15.3 | 50.5 | −7.9 | −0.4 | −7.1 |
| 107 | ACATGATGCCGGAGACACGG | SEQ ID NO:1551 | −6.6 | −25.6 | 69 | −17.4 | −1.5 | −8.2 |
| 142 | AGGAACATGGTAGTTTAAGT | SEQ ID NO:1552 | −6.6 | −19.7 | 61.1 | −13.1 | 0 | −4.3 |
| 252 | CAATCTTTATCATTGCCTCC | SEQ ID NO:1553 | −6.6 | −23.5 | 68.2 | −16.9 | 0 | −3 |
| 466 | AATAACGATAAATTCATTAT | SEQ ID NO:1554 | −6.6 | −13.2 | 45.5 | −6 | −0.3 | −3.1 |
| 800 | TCTTGTCTTTGCCTGTTCTG | SEQ ID NO:1555 | −6.6 | −25.4 | 76.3 | −18.8 | 0 | −3 |
| 957 | ACTACTGCTGCAACATCATC | SEQ ID NO:1556 | −6.6 | −22.8 | 67.2 | −16.2 | 0 | −7.1 |
| 1021 | CACAGCTCGTCCGGGGTGAT | SEQ ID NO:1557 | −6.6 | −29.3 | 79.2 | −21.7 | −0.9 | −7.1 |
| 1022 | GCACAGCTCGTCCGGGGTGA | SEQ ID NO:1558 | −6.6 | −31.1 | 83.6 | −23.5 | −0.9 | −7.5 |
| 1154 | CAGTATAGTCATCAAAGTTG | SEQ ID NO:1559 | −6.6 | −18.6 | 58.9 | −12 | 0 | 3.3 |
| 1397 | CCATCAAAGTATCTGCTGTC | SEQ ID NO:1560 | −6.6 | −22.9 | 67.9 | −16.3 | 0 | −3.6 |
| 1728 | ATCAGAACTGACTTCTGATG | SEQ ID NO:1561 | −6.6 | −19.8 | 60.8 | −9 | −4.2 | −9.9 |
| 1811 | TGCCTTCAGAGTGCATATAA | SEQ ID NO:1562 | −6.6 | −22.9 | 67.4 | −14.8 | −1.4 | −5.6 |
| 1834 | ATGTTTCAATTCACCAGCAA | SEQ ID NO:1563 | −6.6 | −21.7 | 63.9 | −15.1 | 0 | −4.1 |
| 2174 | TTCGTACATTTTGTATAGAT | SEQ ID NO:1564 | −6.6 | −18.6 | 58.5 | −11.1 | −0.8 | −4.8 |
| 2789 | CACTACTGTAATATTTCGCT | SEQ ID NO:1565 | −6.6 | −20.6 | 61.8 | −14 | 0 | −4.2 |
| 2998 | TCAGCAGTCATTTAAAAAAT | SEQ ID NO:1566 | −6.6 | −16.3 | 52.2 | −9.7 | 0 | −5 |
| 52 | GGGGTGCACACACGAGCTTC | SEQ ID NO:1567 | −6.5 | −27.9 | 77.9 | −19 | −2.4 | −9.8 |
| 194 | CCAGTCTCTGAAGGCCTTTG | SEQ ID NO:1568 | −6.5 | −26.5 | 75.4 | −18.5 | −0.3 | −10.9 |
| 255 | TCCCAATCTTTATCATTGCC | SEQ ID NO:1569 | −6.5 | −24.6 | 69.9 | −17.6 | −0.1 | −3.4 |
| 573 | TTAACGAGCTTGGCAATTGT | SEQ ID NO:1570 | −6.5 | −21.8 | 63.4 | −14.4 | −0.7 | −7 |
| 1032 | TGGAGTGTTTGCACAGCTCG | SEQ ID NO:1571 | −6.5 | −25.7 | 74.2 | −16.4 | −2.8 | −9.1 |
| 1161 | AAATTCACAGTATAGTCATC | SEQ ID NO:1572 | −6.5 | −18 | 57.6 | −11.5 | 0 | −3.1 |
| 1608 | CTTTCTTGCATGGAGATCCG | SEQ ID NO:1573 | −6.5 | −24.6 | 70.2 | −17.6 | −0.2 | −6.4 |
| 1725 | AGAACTGACTTCTGATGATA | SEQ ID NO:1574 | −6.5 | −19 | 58.9 | −11.7 | −0.6 | −3.2 |
| 1835 | CATGTTTCAATTCACCAGCA | SEQ ID NO:1575 | −6.5 | −23.1 | 67.3 | −16.6 | 0 | −4.1 |
| 1913 | TCTGACACTTGGCATAAGTG | SEQ ID NO:1576 | −6.5 | −21.9 | 65.4 | −13.2 | −2.2 | −8.8 |
| 1940 | GCCGAGCAACCACTTGCTGA | SEQ ID NO:1577 | −6.5 | −28.4 | 75.4 | −18.3 | −3.6 | −8.8 |
| 1941 | TGCCGAGCAACCACTTGCTG | SEQ ID NO:1578 | −6.5 | −27.8 | 74 | −18.3 | −3 | −9.8 |
| 2018 | GGGGCACCTTGATCGTTCTT | SEQ ID NO:1579 | −6.5 | −27.8 | 77.8 | −19.3 | −2 | −10.7 |
| 2095 | TCTCAGCACAGCAAGGTGGA | SEQ ID NO:1580 | −6.5 | −25.8 | 74.9 | −18.4 | −0.7 | −5.1 |
| 2120 | TCCGTGGGAAATCAACATCA | SEQ ID NO:1581 | −6.5 | −22.4 | 63.5 | −15.4 | −0.2 | −4.8 |
| 2121 | TTCCGTGGGAAATCAACATC | SEQ ID NO:1582 | −6.5 | −21.8 | 62.7 | −14.3 | −0.9 | −5.5 |
| 2134 | AGATTTGGCAAGATTCCGTG | SEQ ID NO:1583 | −6.5 | −22.9 | 66.1 | −15.9 | −0.1 | −4 |
| 2314 | CTTCACAAAAATCACATATT | SEQ ID NO:1584 | −6.5 | −16 | 51.3 | −9.5 | 0 | −2.1 |
| 2698 | AAATCCTACGAATAAAATTT | SEQ ID NO:1585 | −6.5 | −15.6 | 49.6 | −9.1 | 0 | −4.9 |
| 2960 | GGAAATAAAAAACACTTTTA | SEQ ID NO:1586 | −6.5 | −12.6 | 44.3 | −5.3 | −0.6 | −3.7 |
| 45 | ACACACGAGCTTCGGTGGGC | SEQ ID NO:1587 | −6.4 | −28 | 76.5 | −18.4 | −3.2 | −10.9 |
| 81 | AGGCCAGGGGCGAGTGGCTG | SEQ ID NO:1588 | −6.4 | −31.6 | 85.3 | −21.9 | −3.3 | −9.8 |
| 424 | GCTATTGACAGGACTGGGTT | SEQ ID NO:1589 | −6.4 | −24.6 | 72.1 | −18.2 | 0 | −5.8 |
| 585 | TCATACATATACTTAACGAG | SEQ ID NO:1590 | −6.4 | −16.9 | 53.5 | −10.5 | 0 | −3.5 |
| 613 | AAAGCTGGTATCTTGACTTT | SEQ ID NO:1591 | −6.4 | −20.7 | 63 | −14.3 | 0 | −5.3 |
| 653 | CACCTTCCAATTGTTGGATA | SEQ ID NO:1592 | −6.4 | −23.2 | 66.7 | −14.4 | −2.4 | −7.9 |
| 889 | ATCAGAAGCAAAGTAATACT | SEQ ID NO:1593 | −6.4 | −17.1 | 54.1 | −10.7 | 0 | −5.4 |
| 959 | CCACTACTGCTGCAACATCA | SEQ ID NO:1594 | −6.4 | −25.1 | 70.4 | −18.7 | 0 | −7.3 |
| 1166 | CACCCAAATTCACAGTATAG | SEQ ID NO:1595 | −6.4 | −20.9 | 61.3 | −14.5 | 0 | −3.1 |
| 1511 | TCTCAGGACCAGCATTAATA | SEQ ID NO:1596 | −6.4 | −22.4 | 66.1 | −16 | 0 | −4.2 |
| 1635 | TTCAATCCAAGCATGATCTC | SEQ ID NO:1597 | −6.4 | −21.7 | 64.5 | −15.3 | 0 | −4.9 |
| 1718 | ACTTCTGATGATAAAGTTCT | SEQ ID NO:1598 | −6.4 | −18.6 | 58.5 | −11.7 | −0.1 | −3.6 |
| 1911 | TGACACTTGGCATAAGTGTG | SEQ ID NO:1599 | −6.4 | −21.8 | 65 | −11 | −4.4 | −11.2 |
| 2019 | TGGGGCACCTTGATCGTTCT | SEQ ID NO:1600 | −6.4 | −27.7 | 77.3 | −19.3 | −2 | −10.7 |
| 2103 | TCATAGCCTCTCAGCACAGC | SEQ ID NO:1601 | −6.4 | −27.1 | 78.8 | −20.7 | 0.1 | −4.1 |
| 2173 | TCGTACATTTTGTATAGATA | SEQ ID NO:1602 | −6.4 | −18.2 | 57.6 | −10.9 | −0.8 | −4.8 |
| 2594 | AAACCCTTCCCTAACTGTCC | SEQ ID NO:1603 | −6.4 | −26.8 | 72 | −20.4 | 0 | −3.2 |
| 2681 | TTTTTCAGTTTTAAGTTTTA | SEQ ID NO:1604 | −6.4 | −17.2 | 56.8 | −10.8 | 0 | −2.6 |
| 2706 | TTAGATATAAATCCTACCAA | SEQ ID NO:1605 | −6.4 | −17.6 | 54.4 | −10.4 | −0.6 | −4.2 |
| 2912 | CCCAACATGTACACATCCCA | SEQ ID NO:1606 | −6.4 | −26.7 | 71.5 | −20.3 | 0 | −7 |
| 2972 | CTACAGATACAAGGAAATAA | SEQ ID NO:1607 | −6.4 | −15.4 | 50 | −9 | 0 | −1.4 |
| 341 | CCATATCTTGTTGCTTGTGA | SEQ ID NO:1608 | −6.3 | −23.7 | 70.1 | −17.4 | 0 | −3.6 |
| 597 | CTTTCCCGATTGTCATACAT | SEQ ID NO:1609 | −6.3 | −23.9 | 68.1 | −17.6 | 0 | −4.4 |
| 979 | ATGGATAGAAAGACGTCCAT | SEQ ID NO:1610 | −6.3 | −20.6 | 60.4 | −12.7 | −1.6 | −8.6 |
| 1020 | ACAGCTCGTCCGGGGTGATC | SEQ ID NO:1611 | −6.3 | −29 | 80 | −21.7 | −0.9 | −7.1 |
| 1118 | TGTTCACGACAGACTCTGGC | SEQ ID NO:1612 | −6.3 | −24.9 | 72.1 | −17.7 | −0.7 | 6.8 |
| 1495 | AATATGAACTCCACAATCTG | SEQ ID NO:1613 | −6.3 | −18.6 | 56.5 | −12.3 | 0 | −2.7 |
| 1810 | GCCTTCAGAGTGCATATAAG | SEQ ID NO:1615 | −6.3 | −22.9 | 67.8 | −15.7 | −0.7 | −5.4 |
| 1822 | ACCAGCAAGGATGCCTTCAG | SEQ ID NO:1615 | −6.3 | −26.4 | 73.6 | −17.9 | −2.2 | −5.9 |
| 1965 | TCACAAATTACCACAGGCCG | SEQ ID NO:1616 | −6.3 | −24 | 65.8 | −17.2 | 0 | −7.7 |
| 2221 | CAAGGTTTTAAATACAAAAG | SEQ ID NO:1617 | −6.3 | −13.5 | 46.2 | −7.2 | 0 | −5.4 |
| 2607 | CTTAAAACTTGGCAAACCCT | SEQ ID NO:1618 | −6.3 | −21.2 | 60.1 | −14.2 | −0.5 | −4 |
| 2774 | TCGCTTCCTAAATTTCTTCC | SEQ ID NO:1619 | −6.3 | −23.6 | 67.8 | −17.3 | 0 | −4.9 |
| 2954 | AAAAAACACTTTTAGGAGAT | SEQ ID NO:1620 | −6.3 | −14.9 | 49 | −7.8 | −0.6 | −3 |
| 3004 | TGTCATTCAGCAGTCATTTA | SEQ ID NO:1621 | −6.3 | −22.2 | 68.7 | −15.9 | 0 | −4.1 |
| 3047 | AATAGCAGCTCTGTGTTGTG | SEQ ID NO:1622 | −6.3 | −23.2 | 70.2 | −16.9 | 0 | −6.1 |
| 203 | CTCTGTACTCCAGTCTCTGA | SEQ ID NO:1623 | −6.2 | −25.7 | 77.3 | −18.6 | −0.8 | −5.2 |
| 343 | ATCCATATCTTGTTGCTTGT | SEQ ID NO:1624 | −6.2 | −23.5 | 70.5 | −17.3 | 0 | −3.6 |
| 507 | AACTTTTTCAAGTCTTTGTA | SEQ ID NO:1625 | −6.2 | −18.8 | 59.7 | −11.2 | −1.3 | −4.3 |
| 675 | CTTTTAAACACAAGTGCAAA | SEQ ID NO:1626 | −6.2 | −16.9 | 52.8 | −10.7 | 0 | −5.8 |
| 824 | CACGAGAGAGATTGCAGCTT | SEQ ID NO:1627 | −6.2 | −23.5 | 68.1 | −17.3 | 0 | −5.3 |
| 850 | CGGGAAAAGGCAGGTTGTGC | SEQ ID NO:1628 | −6.2 | −24.9 | 69.4 | −17.2 | −1.4 | −4.8 |
| 938 | CATCTTCCAGAAAGATGACG | SEQ ID NO:1629 | −6.2 | −20.6 | 60.3 | −11 | −3.4 | −8.5 |
| 999 | CCTGCAGTTCGTTTAATTCG | SEQ ID NO:1630 | −6.2 | −23.6 | 67.4 | −16.9 | 0 | −8.2 |
| 1623 | ATGATCTCTTTGCGTCTTTC | SEQ ID NO:1631 | −6.2 | −23.1 | 70 | −16.9 | 0 | −4.9 |
| 1705 | AAGTTCTGTTGCTAGTTTCT | SEQ ID NO:1632 | −6.2 | −22.3 | 69.7 | −16.1 | 0 | −4.1 |
| 1920 | AGAGCATTCTGACACTTGGC | SEQ ID NO:1633 | −6.2 | −24.2 | 71.4 | −18 | 0 | −4.1 |
| 1968 | TTATCACAAATTACCACAGG | SEQ ID NO:1634 | −6.2 | −19.2 | 57.9 | −13 | 0 | −3.6 |
| 2062 | TAAAGGGATCACGCTGAGAA | SEQ ID NO:1635 | −6.2 | −20.6 | 60.2 | −13.9 | −0.1 | −5.3 |
| 2271 | TATAAATAAGGATTTACTAA | SEQ ID NO:1636 | −6.2 | −12.8 | 45.2 | −5.2 | −1.3 | −4.1 |
| 2478 | TTTTAGAAACATATTGTCTT | SEQ ID NO:1637 | −6.2 | −16.5 | 53.7 | −9.8 | −0.2 | −4 |
| 2479 | TTTTTAGAAACATATTGTCT | SEQ ID NO:1638 | −6.2 | −16.5 | 53.7 | −9.8 | −0.2 | −4 |
| 2620 | AATCACATCTTCTCTTAAAA | SEQ ID NO:1639 | −6.2 | −17 | 54.3 | −10.8 | 0 | −2.3 |
| 2784 | CTGTAATATTTCGCTTCCTA | SEQ ID NO:1640 | −6.2 | −22 | 64.9 | −15.8 | 0 | −4.2 |
| 3042 | CAGCTCTGTGTTGTGATTTT | SEQ ID NO:1641 | −6.2 | −23.3 | 71.1 | −17.1 | 0 | −4.4 |
| 39 | GAGCTTCGGTGGGCAATCTG | SEQ ID NO:1642 | −6.1 | −26.5 | 74.9 | −19.5 | −0.8 | −5.2 |
| 516 | CTTTCCAAAAACTTTTTCAA | SEQ ID NO:1643 | −6.1 | −17.3 | 53.7 | −11.2 | 0 | |
| 541 | TTCAGATTCGAAGTCATAGC | SEQ ID NO:1644 | −6.1 | −20.8 | 63.4 | −14.2 | −0.1 | −7.6 |
| 638 | GGATAACTCTCTCCACCAAG | SEQ ID NO:1645 | −6.1 | −23.8 | 68.1 | −17.1 | −0.3 | −3.6 |
| 676 | ACTTTTAAACACAAGTGCAA | SEQ ID NO:1646 | −6.1 | −17.8 | 55 | −11.7 | 0 | −5.8 |
| 913 | GGTGTGTTCTATGACAGCAC | SEQ ID NO:1647 | −6.1 | −24.1 | 72.6 | −16.4 | −1.6 | −5.8 |
| 925 | GATGACGCGATTGGTGTGTT | SEQ ID NO:1648 | −6.1 | −24.4 | 69.2 | −17.4 | −0.8 | −7 |
| 931 | CAGAAAGATGACGCGATTGG | SEQ ID NO:1649 | −6.1 | −20.6 | 59.1 | −14 | 0 | −7.9 |
| 1294 | CATCACAGGCAACTCAGTCA | SEQ ID NO:1650 | −6.1 | −24.2 | 70.8 | −17.2 | −0.8 | −4 |
| 1404 | CGAAGACCCATCAAAGTATC | SEQ ID NO:1651 | −6.1 | −21.2 | 61 | −14.4 | −0.4 | −2.8 |
| 1512 | ATCTCAGGACCAGCATTAAT | SEQ ID NO:1652 | −6.1 | −22.7 | 66.6 | −16.6 | 0 | −4.1 |
| 1543 | GCTGGTATAAGCCTTTGTAC | SEQ ID NO:1653 | −6.1 | −23.8 | 70.2 | −16.6 | −1 | −5.2 |
| 1750 | ATAATGATAGCCTCGTCCCA | SEQ ID NO:1654 | −6.1 | −25.5 | 70.5 | −19.4 | 0 | −3.2 |
| 1893 | TGATCTCTCATGATGATCAT | SEQ ID NO:1655 | −6.1 | −20.6 | 63.4 | −11.9 | −2.5 | −12.4 |
| 2015 | GCACCTTGATCGTTCTTTTT | SEQ ID NO:1656 | −6.1 | −24.5 | 71.2 | −18.4 | 0 | −5.3 |
| 2368 | TAGATTCCATTATTCAAAGT | SEQ ID NO:1657 | −6.1 | −18.3 | 57.3 | −12.2 | 0 | −2.6 |
| 2401 | ATAGCTAGAATCTTTCTGAT | SEQ ID NO:1658 | −6.1 | −19.4 | 60.8 | −12.4 | −0.7 | −6.8 |
| 2477 | TTTAGAAACATATTGTCTTC | SEQ ID NO:1659 | −6.1 | −16.8 | 54.7 | −9.8 | −0.7 | −4.3 |
| 2508 | TGAATGAAGTATGGTGAAAC | SEQ ID NO:1660 | −6.1 | −16.5 | 52.5 | −10.4 | 0 | −3.9 |
| 2753 | CCTACAGATAATAGACAACA | SEQ ID NO:1661 | −6.1 | −18.5 | 56.3 | −12.4 | 0 | −2.4 |
| 2836 | GTGCTATAAAATTGTGCAAA | SEQ ID NO:1662 | −6.1 | −17.6 | 54.5 | −10.6 | −0.8 | −6.1 |
| 2886 | AATTTAAAATCATATTGTCA | SEQ ID NO:1663 | −6.1 | −14.3 | 48.3 | −8.2 | 0 | −5 |
| 59 | GGGATCGGGGGTGCACACAC | SEQ ID NO:1664 | −6 | −28.7 | 78.6 | −21.2 | −1.3 | −9.8 |
| 135 | TGGTAGTTTAAGTAAGCAAA | SEQ ID NO:1665 | −6 | −17.8 | 56.2 | −11.8 | 0 | −4.1 |
| 136 | ATGGTAGTTTAAGTAAGCAA | SEQ ID NO:1666 | −6 | −18.5 | 58.1 | −12.5 | 0 | −4.1 |
| 256 | TTCCCAATCTTTATCATTGC | SEQ ID NO:1667 | −6 | −22.7 | 66.7 | −16.2 | −0.1 | −3.4 |
| 575 | ACTTAACGAGCTTGGCAATT | SEQ ID NO:1668 | −6 | −21.7 | 62.9 | −14.8 | −0.7 | −6.5 |
| 674 | TTTTAAACACAAGTGCAAAA | SEQ ID NO:1669 | −6 | −15.3 | 49.5 | −9.3 | 0 | −5.8 |
| 732 | CCAATCAACAGAGGGCTACC | SEQ ID NO:1670 | −6 | −24.9 | 69.3 | −18.4 | −0.2 | −3.7 |
| 891 | GCATCAGAAGCAAAGTAATA | SEQ ID NO:1671 | −6 | −18.5 | 56.8 | −12 | −0.1 | −5.3 |
| 1162 | CAAATTCACAGTATAGTCAT | SEQ ID NO:1672 | −6 | −18.3 | 57.6 | −12.3 | 0 | −3.1 |
| 1262 | CTTGACGTGTTGCTACACCA | SEQ ID NO:1673 | −6 | −25.3 | 71.2 | −17.2 | −2.1 | −5.6 |
| 1438 | CCCCACAGTTAAAGCTCCTC | SEQ ID NO:1674 | −6 | −27.6 | 75.3 | −21.6 | 0 | −5 |
| 1439 | TCCCCACAGTTAAAGCTCCT | SEQ ID NO:1675 | −6 | −27.6 | 75.3 | −21.6 | 0 | −5 |
| 1917 | GCATTCTGACACTTGGCATA | SEQ ID NO:1676 | −6 | −24 | 70 | −18 | 0 | −4.2 |
| 2022 | GAGTGGGGCACCTTGATCGT | SEQ ID NO:1677 | −6 | −28.1 | 78.3 | −20.5 | −1.2 | −10.7 |
| 2334 | TGGGAAAATGTAAGAGGTAA | SEQ ID NO:1678 | −6 | −17.1 | 53.6 | −11.1 | 0 | −1.2 |
| 2455 | AGATTGAAGTGGAGGGTCCA | SEQ ID NO:1679 | −6 | −24.3 | 71 | −16.6 | −1.7 | −6.1 |
| 2955 | TAAAAAACACTTTTAGGAGA | SEQ ID NO:1680 | −6 | −14.6 | 48.5 | −7.8 | −0.6 | −3.2 |
| 197 | ACTCCAGTCTCTGAAGGCCT | SEQ ID NO:1681 | −5.9 | −27.8 | 79.2 | −21.2 | −0.3 | −8.5 |
| 569 | CGAGCTTGGCAATTGTCTCT | SEQ ID NO:1682 | −5.9 | −25.1 | 72 | −18.3 | −0.7 | −8.3 |
| 596 | TTTCCCGATTGTCATACATA | SEQ ID NO:1683 | −5.9 | −22.7 | 65.7 | −16.8 | 0 | −4.4 |
| 652 | ACCTTCCAATTGTTGGATAA | SEQ ID NO:1684 | −5.9 | −21.8 | 63.4 | −13.2 | −2.7 | −8.2 |
| 673 | TTTAAACACAAGTGCAAAAG | SEQ ID NO:1685 | −5.9 | −15.2 | 49.3 | −9.3 | 0 | −5.8 |
| 770 | GAATGTGATCAGTAGAAAGT | SEQ ID NO:1686 | −5.9 | −18.1 | 57.1 | −12.2 | 0 | −6.1 |
| 892 | TGCATCAGAAGCAAAGTAAT | SEQ ID NO:1687 | −5.9 | −18.8 | 57.3 | −12 | −0.8 | −6.6 |
| 946 | AACATCATCATCTTCCAGAA | SEQ ID NO:1688 | −5.9 | −20.8 | 62.2 | −14.9 | 0 | −2.9 |
| 1338 | AAGACTGGTGTGTTTCTGTC | SEQ ID NO:1689 | −5.9 | −22.9 | 70.7 | −16.4 | −0.3 | −4 |
| 1710 | TGATAAAGTTCTGTTGCTAG | SEQ ID NO:1690 | −5.9 | −19.2 | 60.1 | −13.3 | 0 | −3.6 |
| 1711 | ATGATAAAGTTCTGTTGCTA | SEQ ID NO:1691 | −5.9 | −19.2 | 59.9 | −13.3 | 0 | −3.6 |
| 1735 | TCCCATTATCAGAACTGACT | SEQ ID NO:1692 | −5.9 | −22.7 | 65.9 | −16.3 | −0.1 | −7.6 |
| 1869 | ACAGGCATCAATTTATCCAC | SEQ ID NO:1693 | −5.9 | −22.2 | 65.2 | −16.3 | 0 | −4 |
| 1870 | CACAGGCATCAATTTATCCA | SEQ ID NO:1694 | −5.9 | −22.7 | 65.8 | −16.8 | 0 | −3.4 |
| 2105 | CATCATAGCCTCTCAGCACA | SEQ ID NO:1695 | −5.9 | −26 | 74.9 | −19.2 | −0.7 | −4.1 |
| 2502 | AAGTATGGTGAAACAAGTAC | SEQ ID NO:1696 | −5.9 | −17.1 | 54.2 | −10.2 | −0.9 | −4.9 |
| 2550 | GCTTTAGATACTCCAATTAA | SEQ ID NO:1697 | −5.9 | −19.5 | 59.4 | −13.6 | 0 | −2.8 |
| 2623 | ATAAATCACATCTTCTCTTA | SEQ ID NO:1698 | −5.9 | −18.1 | 57.5 | −12.2 | 0 | −1.5 |
| 2783 | TGTAATATTTCGCTTCCTAA | SEQ ID NO:1699 | −5.9 | −20.4 | 61 | −14.5 | 0 | −4.2 |
| 2788 | ACTACTGTAATATTTCGCTT | SEQ ID NO:1700 | −5.9 | −20 | 60.9 | −14.1 | 0 | −4.2 |
| 508 | AAACTTTTTCAAGTCTTTGT | SEQ ID NO:1701 | −5.8 | −18.4 | 58.3 | −11.2 | −1.3 | −4.6 |
| 703 | GCCAACTGCTTGCCCGGGAA | SEQ ID NO:1702 | −5.8 | −30.6 | 78 | −23.2 | −0.2 | −11.4 |
| 728 | TCAACAGAGGGCTACCTCGC | SEQ ID NO:1703 | −5.8 | −26.8 | 74.5 | −17.1 | −3.9 | −9.6 |
| 912 | GTGTGTTCTATGACAGCACT | SEQ ID NO:1704 | −5.8 | −23.8 | 71.9 | −16.4 | −1.6 | −5.8 |
| 916 | ATTGGTGTGTTCTATGACAG | SEQ ID NO:1705 | −5.8 | −21.5 | 66.3 | −15.2 | −0.1 | −3.9 |
| 1078 | CATAAATGAACTGAAGTTGC | SEQ ID NO:1706 | −5.8 | −17 | 53.3 | −11.2 | 0 | −5.7 |
| 1222 | AGCAATAAGAATCAAACGCC | SEQ ID NO:1707 | −5.8 | −19.2 | 56.2 | −13.4 | 0 | −4.1 |
| 1285 | CAACTCAGTCAGCTCCTCAA | SEQ ID NO:1708 | −5.8 | −24.9 | 72.2 | −19.1 | 0 | −4.4 |
| 1503 | CCAGCATTAATATGAACTCC | SEQ ID NO:1709 | −5.8 | −21.4 | 62.2 | −14.9 | −0.4 | −4.2 |
| 1505 | GACCAGCATTAATATGAACT | SEQ ID NO:1710 | −5.8 | −19.8 | 59.1 | −13.3 | −0.4 | −4.2 |
| 1507 | AGGACCAGCATTAATATGAA | SEQ ID NO:1711 | −5.8 | −19.9 | 59.3 | −13.4 | −0.4 | −4.2 |
| 1749 | TAATGATAGCCTCGTCCCAT | SEQ ID NO:1712 | −5.8 | −25.5 | 70.5 | −19.7 | 0 | −3.2 |
| 1751 | CATAATGATAGCCTCGTCCC | SEQ ID NO:1713 | −5.8 | −25.5 | 70.5 | −19.7 | 0 | −3.2 |
| 2089 | CACAGCAAGGTGGAAAGCCA | SEQ ID NO:1715 | −5.8 | −24.7 | 68.6 | −17.5 | −1.3 | −6.6 |
| 2102 | CATAGCCTCTCAGCACAGCA | SEQ ID NO:1715 | −5.8 | −27.4 | 78 | −20.7 | −0.7 | −4.8 |
| 2223 | ATCAAGGTTTTAAATACAAA | SEQ ID NO:1716 | −5.8 | −14.6 | 48.6 | −8.8 | 0 | −5.4 |
| 2294 | GAGTGGAATAATTATAACTG | SEQ ID NO:1717 | −5.8 | −15.8 | 51.4 | −10 | 0 | −6.3 |
| 2496 | GGTGAAACAAGTACCAATTT | SEQ ID NO:1718 | −5.8 | −19.1 | 57.4 | −12.3 | −0.9 | −5.3 |
| 2759 | CTTCCACCTACAGATAATAG | SEQ ID NO:1719 | −5.8 | −21.1 | 62.4 | −15.3 | 0 | −2.1 |
| 2827 | AATTGTGCAAATATGTTAAG | SEQ ID NO:1720 | −5.8 | −15.7 | 51 | −9.9 | 0 | −6.1 |
| 2840 | GTTTGTGCTATAAAATTGTG | SEQ ID NO:1721 | −5.8 | −17.9 | 56.4 | −12.1 | 0 | −3.6 |
| 2908 | ACATGTACACATCCCATCTT | SEQ ID NO:1722 | −5.8 | −24.1 | 69.4 | −18.3 | 0 | −6.7 |
| 123 | TAACCAAATATACCACACAT | SEQ ID NO:1723 | −5.7 | −18.2 | 55.1 | −12.5 | 0 | −4.1 |
| 202 | TCTGTACTCCAGTCTCTGAA | SEQ ID NO:1724 | −5.7 | −24.1 | 72.5 | −17.5 | −0.8 | −5.2 |
| 301 | AACTTTTCCTTTCTTCTTAA | SEQ ID NO:1725 | −5.7 | −20 | 61.8 | −14.3 | 0 | −2 |
| 512 | CCAAAAACTTTTTCAAGTCT | SEQ ID NO:1726 | −5.7 | −18.3 | 56 | −11.2 | −1.3 | −4.9 |
| 961 | ATCCACTACTGCTGCAACAT | SEQ ID NO:1727 | −5.7 | −24.4 | 69.3 | −18.7 | 0 | −7.3 |
| 1165 | ACCCAAATTCACAGTATAGT | SEQ ID NO:1728 | −5.7 | −21.4 | 63.1 | −15.7 | 0 | −2.7 |
| 1236 | TAACTTGTTCCACAAGCAAT | SEQ ID NO:1729 | −5.7 | −20.6 | 60.9 | −12 | −2.9 | −8.2 |
| 1237 | GTAACTTGTTCCACAAGCAA | SEQ ID NO:1730 | −5.7 | −21.8 | 63.9 | −13.2 | −2.9 | −8.2 |
| 1651 | CAAATCAGGCAGCCGTTTCA | SEQ ID NO:1731 | −5.7 | −25.2 | 70.2 | −18.7 | −0.3 | −9 |
| 1864 | CATCAATTTATCCACCAAAG | SEQ ID NO:1732 | −5.7 | −19.6 | 58 | −13.9 | 0 | −2.6 |
| 2072 | CCAGCAACTGTAAAGGGATC | SEQ ID NO:1733 | −5.7 | −22.5 | 64.9 | −15.4 | −1.3 | 6.4 |
| 2077 | GAAAGCCAGCAACTGTAAAG | SEQ ID NO:1734 | −5.7 | −20.1 | 59 | 13.4 | 0.9 | −6.4 |
| 2187 | TTAATCATACAGTTTCGTAC | SEQ ID NO:1735 | −5.7 | −18.5 | 58.1 | −12.8 | 0 | −3.4 |
| 2770 | TTCCTAAATTTCTTCCACCT | SEQ ID NO:1736 | −5.7 | −23.5 | 67.4 | −17.8 | 0 | 4.6 |
| 2966 | ATACAAGGAAATAAAAAACA | SEQ ID NO:1737 | −5.7 | −11.4 | 41.9 | −5.7 | 0 | −1.2 |
| 67 | TGGCTGGCGGGATCGGGGGT | SEQ ID NO:1738 | −5.6 | −31.9 | 84.3 | −25.4 | −0.7 | −6.3 |
| 296 | TTCCTTTCTTCTTAATAAGC | SEQ ID NO:1739 | −5.6 | −20.2 | 62.3 | −14.6 | 0 | −5.1 |
| 595 | TTCCCGATTGTCATACATAT | SEQ ID NO:1740 | −5.6 | −22.6 | 65.3 | −17 | 0 | −3.9 |
| 966 | CGTCCATCCACTACTGCTGC | SEQ ID NO:1741 | −5.6 | −28.6 | 78.3 | −23 | 0 | −5 |
| 1731 | ATTATCAGAACTGACTTCTG | SEQ ID NO:1742 | −5.6 | −19 | 59.3 | −11.6 | −1.8 | −7.6 |
| 1902 | GCATAAGTGTGATCTCTCAT | SEQ ID NO:1743 | −5.6 | −22.2 | 67.7 | −15.9 | −0.4 | −6.5 |
| 1912 | CTGACACTTGGCATAAGTGT | SEQ ID NO:1744 | −5.6 | −22.7 | 67.1 | −12.9 | −4.2 | −11.2 |
| 2175 | TTTCGTACATTTTGTATAGA | SEQ ID NO:1745 | −5.6 | −18.7 | 58.9 | −12.5 | −0.3 | −4.8 |
| 2338 | TTACTGGGAAAATGTAAGAG | SEQ ID NO:1746 | −5.6 | −16.6 | 52.8 | −11 | 0 | −3.7 |
| 2473 | GAAACATATTGTCTTCTCAG | SEQ ID NO:1747 | −5.6 | −18.9 | 59.3 | −12.4 | −0.7 | −4.3 |
| 2481 | AATTTTTAGAAACATATTGT | SEQ ID NO:1748 | −5.6 | −14.5 | 48.9 | −8.9 | 0 | −2.9 |
| 2534 | TTAAATGCACTACTCTTTCA | SEQ ID NO:1749 | −5.6 | −19.4 | 59.7 | −13.8 | 0 | −5 |
| 2603 | AAACTTGGCAAACCCTTCCC | SEQ ID NO:1750 | −5.6 | −25.7 | 68.5 | −19.4 | −0.5 | −4 |
| 568 | GAGCTTGGCAATTGTCTCTG | SEQ ID NO:1751 | −5.5 | −24.3 | 71.9 | −17.9 | −0.7 | −8.3 |
| 584 | CATACATATACTTAACGAGC | SEQ ID NO:1752 | −5.5 | −18.3 | 56.2 | −12.8 | 0 | −3.5 |
| 651 | CCTTCCAATTGTTGGATAAC | SEQ ID NO:1753 | −5.5 | −21.8 | 63.4 | −13.6 | −2.7 | −8.2 |
| 702 | CCAACTGCTTGCCCGGGAAA | SEQ ID NO:1754 | −5.5 | −28.1 | 72.1 | −21 | 0 | −11.4 |
| 941 | CATCATCTTCCAGAAAGATG | SEQ ID NO:1755 | −5.5 | −20.1 | 60.5 | −11 | −3.6 | −8.8 |
| 1617 | TCTTTGCGTCTTTCTTGCAT | SEQ ID NO:1756 | −5.5 | −24.7 | 73 | −18.2 | −0.9 | −5.1 |
| 1924 | CTGAAGAGCATTCTGACACT | SEQ ID NO:1757 | −5.5 | −21.9 | 65.1 | −15.4 | −0.9 | −5.2 |
| 2138 | TCACAGATTTGGCAAGATTC | SEQ ID NO:1758 | −5.5 | −20.9 | 63.4 | −15.4 | 0 | −4 |
| 2166 | TTTTGTATAGATATTCCTCA | SEQ ID NO:1759 | −5.5 | −19.7 | 61.7 | −14.2 | 0 | −2.8 |
| 2222 | TCAAGGTTTTAAATACAAAA | SEQ ID NO:1760 | −5.5 | −13.9 | 47.1 | −8.4 | 0 | −4.6 |
| 2361 | CATTATTCAAAGTCCTCCAC | SEQ ID NO:1761 | −5.5 | −22.1 | 64.9 | −16.6 | 0 | −1.6 |
| 2400 | TAGCTAGAATCTTTCTGATA | SEQ ID NO:1762 | −5.5 | −19.1 | 60.3 | −12.9 | −0.4 | −6.6 |
| 2445 | GGAGGGTCCAGAAATGCAAC | SEQ ID NO:1763 | −5.5 | −23.7 | 67.3 | −17.3 | −0.8 | −7.2 |
| 2661 | CAGTTTGATTTAAAAACAAA | SEQ ID NO:1764 | −5.5 | −133 | 45.8 | −6.1 | −1.7 | −9 |
| 2914 | TACCCAACATGTACACATCC | SEQ ID NO:1765 | −5.5 | −23.9 | 67 | −18.4 | 0 | −7 |
| 61 | GCGGGATCGGGGGTGCACAC | SEQ ID NO:1766 | −5.4 | −30.4 | 80.8 | −23.4 | −0.7 | −11.1 |
| 668 | ACACAAGTGCAAAAGCACCT | SEQ ID NO:1767 | −5.4 | −22.3 | 63.2 | −14.5 | −2.4 | −9 |
| 960 | TCCACTACTGCTGCAACATC | SEQ ID NO:1768 | −5.4 | −24.8 | 70.9 | −19.4 | 0 | −7.3 |
| 1028 | GTGTTTGCACAGCTCGTCCG | SEQ ID NO:1769 | −5.4 | −28.3 | 78.6 | −21 | −1.9 | −8.4 |
| 1419 | CTCTCCTTACAGTAACGAAG | SEQ ID NO:1770 | −5.4 | −21.3 | 62.8 | −15.9 | 0 | |
| 1706 | AAAGTTCTGTTGCTAGTTTC | SEQ ID NO:1771 | −5.4 | −20.7 | 65 | −15.3 | 0 | −4.1 |
| 1817 | CAAGGATGCCTTCAGAGTGC | SEQ ID NO:1772 | −5.4 | −25.3 | 72.8 | −18.7 | −1.1 | −5.5 |
| 2094 | CTCAGCACAGCAAGGTGGAA | SEQ ID NO:1773 | −5.4 | −24.7 | 70.7 | −18.4 | −0.7 | −5.5 |
| 2272 | ATATAAATAAGGATTTACTA | SEQ ID NO:1774 | −5.4 | −13.5 | 46.8 | −6.7 | −1.3 | −4.1 |
| 2476 | TTAGAAACATATTGTCTTCT | SEQ ID NO:1775 | −5.4 | −17.6 | 56.3 | −10.6 | −1.5 | −5.9 |
| 2497 | TGGTGAAACAAGTACCAATT | SEQ ID NO:1776 | −5.4 | −19 | 57 | −12.3 | −1.2 | −5.6 |
| 2597 | GGCAAACCCTTCCCTAACTG | SEQ ID NO:1777 | −5.4 | −26.9 | 71.4 | −21.5 | 0 | −4 |
| 2841 | AGTTTGTGCTATAAAATTGT | SEQ ID NO:1778 | −5.4 | −17.9 | 56.6 | −12.5 | 0 | −3.6 |
| 41 | ACGAGCTTCGGTGGGCAATC | SEQ ID NO:1779 | −5.3 | −26.6 | 73.6 | −19.8 | −1.4 | −7.3 |
| 48 | TGCACACACGAGCTTCGGTG | SEQ ID NO:1780 | −5.3 | −26.3 | 72.5 | −18.2 | −2.8 | −10.4 |
| 962 | CATCCACTACTGCTGCAACA | SEQ ID NO:1781 | −5.3 | −25.1 | 70.4 | −19.8 | 0 | −7.3 |
| 1398 | CCCATCAAAGTATCTGCTGT | SEQ ID NO:1782 | −5.3 | −24.5 | 70 | −19.2 | 0 | −3.6 |
| 1426 | AGCTCCTCTCTCCTTACAGT | SEQ ID NO:1783 | −5.3 | −27.8 | 81.9 | −22.5 | 0 | −4.3 |
| 1490 | GAACTCCACAATCTGTCTCC | SEQ ID NO:1784 | −5.3 | −24.5 | 70.5 | −19.2 | 0 | −2.6 |
| 1652 | TCAAATCAGGCAGCCGTTTC | SEQ ID NO:1785 | −5.3 | −24.9 | 70.6 | −18.8 | −0.3 | −9 |
| 1689 | TTCTGAATTTCGTCATCCAT | SEQ ID NO:1786 | −5.3 | −22.1 | 65.3 | −16.8 | 0 | −5 |
| 1859 | ATTTATCCACCAAAGCCAGA | SEQ ID NO:1787 | −5.3 | −23.6 | 66.2 | −18.3 | 0 | −3.2 |
| 2016 | GGCACCTTGATCGTTCTTTT | SEQ ID NO:1788 | −5.3 | −25.6 | 73.4 | −20.3 | 0 | −5.3 |
| 2140 | AGTCACAGATTTGGCAAGAT | SEQ ID NO:1789 | −5.3 | −21.6 | 65 | −16.3 | 0 | −4.1 |
| 2407 | AAAATAATAGCTAGAATCTT | SEQ ID NO:1790 | −5.3 | −14.3 | 48.2 | −9 | 0 | −6.3 |
| 2547 | TTAGATACTCCAATTAAATG | SEQ ID NO:1791 | −5.3 | −16 | 51.5 | −10.7 | 0 | −3.2 |
| 2817 | ATATGTTAAGGATTGAGACC | SEQ ID NO:1792 | −5.3 | −19.3 | 59.3 | −14 | 0 | −3.2 |
| 2902 | ACACATCCCATCTTCAAATT | SEQ ID NO:1793 | −5.3 | −22.1 | 63.9 | −16.8 | 0 | −2.9 |
| 2903 | TACACATCCCATCTTCAAAT | SEQ ID NO:1794 | −5.3 | −21.7 | 63 | −16.4 | 0 | −1 |
| 2974 | GACTACAGATACAAGGAAAT | SEQ ID NO:1795 | −5.3 | −17.2 | 53.9 | −11.9 | 0 | −2.2 |
| 2975 | AGACTACAGATACAAGGAAA | SEQ ID NO:1796 | −5.3 | −17.2 | 54 | −11.9 | 0 | −2.2 |
| 473 | CATTGTGAATAACGATAAAT | SEQ ID NO:1797 | −5.2 | −14.8 | 48.3 | −9 | −0.3 | −3.5 |
| 513 | TCCAAAAACTTTTTCAAGTC | SEQ ID NO:1798 | −5.2 | −17.8 | 55.4 | −11.2 | −1.3 | −4.9 |
| 893 | TTGCATCAGAAGCAAAGTAA | SEQ ID NO:1799 | −5.2 | −18.9 | 57.6 | −12 | −1.7 | −8.5 |
| 930 | AGAAAGATGACGCGATTGGT | SEQ ID NO:1800 | −5.2 | −21.1 | 60.7 | −15.4 | 0 | −7.9 |
| 1173 | TTCAAACCACCCAAATTCAC | SEQ ID NO:1801 | −5.2 | −21.6 | 61 | −16.4 | 0 | −3.1 |
| 1414 | CTTACAGTAACGAAGACCCA | SEQ ID NO:1802 | −5.2 | −22.2 | 62.9 | −17 | 0 | −4.7 |
| 1729 | TATCAGAACTGACTTCTGAT | SEQ ID NO:1803 | −5.2 | −19.5 | 60.3 | −10 | −4.3 | −10.1 |
| 1758 | CAAGTAGCATAATGATAGCC | SEQ ID NO:1804 | −5.2 | −20.5 | 61.3 | −14.8 | −0.1 | −4.1 |
| 1821 | CCAGCAAGGATGCCTTCAGA | SEQ ID NO:1805 | −5.2 | −26.8 | 74.3 | −19.4 | −2.2 | −6.5 |
| 1857 | TTATCCACCAAAGCCAGAGG | SEQ ID NO:1806 | −5.2 | −24.7 | 68.5 | −19.5 | 0 | −3.6 |
| 1858 | TTTATCCACCAAAGCCAGAG | SEQ ID NO:1807 | −5.2 | −23.6 | 66.5 | −18.4 | 0 | −3.2 |
| 1953 | ACAGGCCGCCCCTGCCGAGC | SEQ ID NO:1808 | −5.2 | −36.4 | 88.6 | −28.4 | −2.8 | −9 |
| 2092 | CAGCACAGCAAGGTGGAAAG | SEQ ID NO:1809 | −5.2 | −22.7 | 65.4 | −16.6 | −0.7 | −5.5 |
| 2129 | TGGCAAGATTCCGTGGGAAA | SEQ ID NO:1810 | −5.2 | −23.7 | 65.9 | −17 | −1.4 | −6.8 |
| 2303 | TCACATATTCAGTGGAATAA | SEQ ID NO:1811 | −5.2 | −17.7 | 55.6 | −11.6 | −0.7 | −4.7 |
| 2319 | GGTAACTTCACAAAAATCAC | SEQ ID NO:1812 | −5.2 | −17.1 | 53.6 | −11.9 | 0 | −2.7 |
| 2354 | CAAAGTCCTCCACAAATTAC | SEQ ID NO:1813 | −5.2 | −20.4 | 59.8 | −15.2 | 0 | −3.3 |
| 2505 | ATGAAGTATGGTGAAACAAG | SEQ ID NO:1815 | −5.2 | −16.6 | 52.7 | −10.4 | −0.9 | −3.9 |
| 2785 | ACTGTAATATTTCGCTTCCT | SEQ ID NO:1815 | −5.2 | −22.5 | 66.1 | −17.3 | 0 | −3.9 |
| 2916 | GATACCCAACATGTACACAT | SEQ ID NO:1816 | −5.2 | −22.1 | 63.4 | −16.9 | 0 | −7 |
| 196 | CTCCAGTCTCTGAAGGCCTT | SEQ ID NO:1817 | −5.1 | −27.7 | 79 | −21.2 | −0.3 | −10.8 |
| 342 | TCCATATCTTGTTGCTTGTG | SEQ ID NO:1818 | −5.1 | −23.5 | 70.4 | −18.4 | 0 | −3.6 |
| 514 | TTCCAAAAACTTTTTCAAGT | SEQ ID NO:1819 | −5.1 | −17.5 | 54.5 | −11.2 | −1.1 | −4.9 |
| 565 | CTTGGCAATTGTCTCTGTGT | SEQ ID NO:1820 | −5.1 | −24.3 | 72.6 | −18.7 | 0 | −8.3 |
| 667 | CACAAGTGCAAAAGCACCTT | SEQ ID NO:1821 | −5.1 | −22.2 | 63 | −15.5 | −1.6 | −8.2 |
| 799 | CTTGTCTTTGCCTGTTCTGT | SEQ ID NO:1822 | −5.1 | −26.2 | 78.2 | −21.1 | 0 | −3 |
| 811 | GCAGCTTCCTTTCTTGTCTT | SEQ ID NO:1823 | −5.1 | −26.8 | 79.8 | −21.7 | 0 | −4.5 |
| 814 | ATTGCAGCTTCCTTTCTTGT | SEQ ID NO:1824 | −5.1 | −25.5 | 75.5 | −20.4 | 0 | −5.2 |
| 1117 | GTTCACGACAGACTCTGGCT | SEQ ID NO:1825 | −5.1 | −25.8 | 74.2 | −19.8 | −0.7 | −6.8 |
| 1182 | ATGTGATCCTTCAAACCACC | SEQ ID NO:1826 | −5.1 | −24 | 67.5 | −18.2 | −0.5 | 4.3 |
| 1440 | ATCCCCACAGTTAAAGCTCC | SEQ ID NO:1827 | −5.1 | −26.7 | 73.4 | −21.6 | 0 | −5 |
| 1442 | TGATCCCCACAGTTAAAGCT | SEQ ID NO:1828 | −5.1 | −24.9 | 69.5 | 19.8 | 0 | −4.8 |
| 1737 | CGTCCCATTATCAGAACTGA | SEQ ID NO:1829 | −5.1 | −23.6 | 66.8 | −18.5 | 0 | 7.3 |
| 2021 | AGTGGGGCACCTTGATCGTT | SEQ ID NO:1830 | −5.1 | −27.6 | 77.4 | −20.5 | −2 | −10.7 |
| 2056 | GATCACGCTGAGAATGCCCT | SEQ ID NO:1831 | −5.1 | −26.6 | 72.2 | −21 | −0.1 | −5.1 |
| 2061 | AAAGGGATCACGCTGAGAAT | SEQ ID NO:1832 | −5.1 | −20.9 | 60.7 | −15.3 | −0.1 | −5.1 |
| 2626 | AAAATAAATCACATCTTCTC | SEQ ID NO:1833 | −5.1 | −15.3 | 50.4 | −10.2 | 0 | −1.2 |
| 2704 | AGATATAAATCCTACCAATA | SEQ ID NO:1834 | −5.1 | −17.5 | 54.1 | −11.6 | −0.6 | −2.7 |
| 2766 | TAAATTTCTTCCACCTACAG | SEQ ID NO:1835 | −5.1 | −20.7 | 61.5 | −15.6 | 0 | −4.9 |
| 2825 | TTGTGCAAATATGTTAAGGA | SEQ ID NO:1836 | −5.1 | −18.2 | 56.5 | −13.1 | 0 | −5.4 |
| 2835 | TGCTATAAAATTGTGCAAAT | SEQ ID NO:1837 | −5.1 | −16.4 | 51.8 | −10.6 | −0.4 | −6.1 |
| 2882 | TAAAATCATATTGTCAGTTG | SEQ ID NO:1838 | −5.1 | −16.1 | 52.6 | −11 | 0 | −2.1 |
| 2904 | GTACACATCCCATCTTCAAA | SEQ ID NO:1839 | −5.1 | −22.9 | 66.1 | −17.8 | 0 | −4.6 |
| 2973 | ACTACAGATACAAGGAAATA | SEQ ID NO:1840 | −5.1 | −16.3 | 52.1 | −11.2 | 0 | −2.2 |
| 148 | CGTTCGAGGAACATGGTAGT | SEQ ID NO:1841 | −5 | −23.2 | 66.8 | −16.3 | −1.9 | −6.7 |
| 371 | CAAGGTGTACATCAAATTCT | SEQ ID NO:1842 | −5 | −19.3 | 59.2 | −13.8 | 0 | −7.9 |
| 570 | ACGAGCTTGGCAATTGTCTC | SEQ ID NO:1843 | −5 | −24.4 | 70.7 | −18.5 | −0.7 | −8.3 |
| 831 | CTGTCCACACGAGAGAGATT | SEQ ID NO:1844 | −5 | −23.6 | 68.1 | −18.6 | 0 | −3.5 |
| 840 | CAGGTTGTGCTGTCCACACG | SEQ ID NO:1845 | −5 | −27.3 | 76.5 | −20.4 | −1.9 | −7 |
| 1031 | GGAGTGTTTGCACAGCTCGT | SEQ ID NO:1846 | −5 | −26.9 | 78 | −19.1 | −2.8 | −9.1 |
| 1104 | TCTGGCTGCTCAAATATTTC | SEQ ID NO:1847 | −5 | −21.9 | 65.7 | −16.9 | 0 | −6.1 |
| 1181 | TGTGATCCTTCAAACCACCC | SEQ ID NO:1848 | −5 | −26 | 70.9 | −20.3 | −0.5 | −4.3 |
| 1187 | CCTTTATGTGATCCTTCAAA | SEQ ID NO:1849 | −5 | −21.7 | 63.7 | −16 | −0.5 | −5.5 |
| 1545 | TGGCTGGTATAAGCCTTTGT | SEQ ID NO:1850 | −5 | −25.1 | 72.7 | −16.9 | −3.2 | −9.5 |
| 1680 | TCGTCATCCATGCTCAGTAC | SEQ ID NO:1851 | −5 | −25.5 | 74.3 | −20.5 | 0 | −4.2 |
| 1744 | ATAGCCTCGTCCCATTATCA | SEQ ID NO:1852 | −5 | −26.8 | 74.6 | −21.8 | 0 | −3.2 |
| 1888 | TCTCATGATGATCATGATCA | SEQ ID NO:1853 | −5 | −20.4 | 62.6 | −11.9 | −3.5 | −13.9 |
| 2088 | ACAGCAAGGTGGAAAGCCAG | SEQ ID NO:1854 | −5 | −24 | 67.8 | −17.5 | −1.4 | −6.6 |
| 2398 | GCTAGAATCTTTCTGATACA | SEQ ID NO:1855 | −5 | −20.3 | 62.5 | −14.4 | −0.7 | −6.3 |
| 2498 | ATGGTCAAACAAGTACCAAT | SEQ ID NO:1856 | −5 | −18.9 | 56.7 | −12.3 | −1.6 | −6.5 |
| 2500 | GTATGGTGAAACAAGTACCA | SEQ ID NO:1857 | −5 | −20.5 | 60.9 | −14 | −1.4 | −6.1 |
| 2613 | TCTTCTCTTAAAACTTGGCA | SEQ ID NO:1858 | −5 | −20.6 | 62.3 | −15.6 | 0 | −4 |
| 2733 | AGTCTGAGAAACTAAGGCTA | SEQ ID NO:1859 | −5 | −20 | 61.1 | −15 | 0 | −3.7 |
| 2787 | CTACTGTAATATTTCGCTTC | SEQ ID NO:1860 | −5 | −20.2 | 61.7 | −15.2 | 0 | −4.2 |
| 2798 | CCACCAATGCACTACTGTAA | SEQ ID NO:1861 | −5 | −23.5 | 65.9 | −18.5 | 0 | −5.5 |
| 2888 | CAAATTTAAAATCATATTGT | SEQ ID NO:1862 | −5 | −13.2 | 45.8 | −8.2 | 0 | −5 |
| 2956 | ATAAAAAACACTTTTAGGAG | SEQ ID NO:1863 | −5 | −14 | 47.3 | −7.8 | 1.1 | −3.6 |
| 38 | AGCTTCGGTGGGCAATCTGC | SEQ ID NO:1864 | −4.9 | −27.7 | 77.9 | −21.6 | −1.1 | −6.5 |
| 649 | TTCCAATTGTTGGATAACTC | SEQ ID NO:1865 | −4.9 | −20.2 | 61.1 | −12.6 | −2.7 | −8.2 |
| 765 | TGATCAGTAGAAAGTTTATG | SEQ ID NO:1866 | −4.9 | −16.9 | 54.8 | −12 | 0 | −6 |
| 956 | CTACTGCTGCAACATCATCA | SEQ ID NO:1867 | −4.9 | −23.3 | 67.8 | −18.4 | 0 | −7.3 |
| 1025 | TTTGCACAGCTCGTCCGGGG | SEQ ID NO:1868 | −4.9 | −29.5 | 79.6 | −24 | −0.3 | −6.9 |
| 1106 | ACTCTGGCTGCTCAAATATT | SEQ ID NO:1869 | −4.9 | −22.5 | 66.3 | −17.6 | 0 | −6.1 |
| 1171 | CAAACCACCCAAATTCACAG | SEQ ID NO:1870 | −4.9 | −21.8 | 60.7 | −16.9 | 0 | −3.1 |
| 1234 | ACTTGTTCCACAAGCAATAA | SEQ ID NO:1871 | −4.9 | −20.6 | 60.9 | −12.8 | −2.9 | −8.2 |
| 1279 | AGTCAGCTCCTCAAGAACTT | SEQ ID NO:1872 | −4.9 | −23.8 | 70.3 | −18.9 | 0 | −4.4 |
| 1411 | ACAGTAACGAAGACCCATCA | SEQ ID NO:1873 | −4.9 | −22.6 | 63.7 | −17 | −0.4 | −3.9 |
| 1681 | TTCGTCATCCATGCTCAGTA | SEQ ID NO:1874 | −4.9 | −25.4 | 74.1 | −20.5 | 0 | −4.2 |
| 1701 | TCTGTTGCTAGTTTCTGAAT | SEQ ID NO:1875 | −4.9 | −21.6 | 66.7 | −16.7 | 0 | −4.7 |
| 1730 | TTATCAGAACTGACTTCTGA | SEQ ID NO:1876 | −4.9 | −19.6 | 60.7 | −11.1 | −3.6 | −8.7 |
| 1738 | TCGTCCCATTATCAGAACTG | SEQ ID NO:1877 | −4.9 | −23.4 | 67 | −18.5 | 0 | −4.9 |
| 2125 | AAGATTCCGTGGGAAATCAA | SEQ ID NO:1878 | −4.9 | −20.4 | 59.3 | −13.6 | −1.9 | −7.1 |
| 2172 | CGTACATTTTGTATAGATAT | SEQ ID NO:1879 | −4.9 | −17.8 | 56.3 | −12 | −0.8 | −4.8 |
| 2461 | CTTCTCAGATTGAAGTGGAG | SEQ ID NO:1880 | −4.9 | −21 | 64.5 | −15.3 | −0.6 | −4.7 |
| 2621 | AAATCACATCTTCTCTTAAA | SEQ ID NO:1881 | −4.9 | −17 | 54.3 | −12.1 | 0 | −2.3 |
| 2790 | GCACTACTGTAATATTTCGC | SEQ ID NO:1882 | −4.9 | −21.5 | 63.9 | −16.6 | 0 | −6.8 |
| 105 | ATGATGCCGGAGACACGGCC | SEQ ID NO:1883 | −4.8 | −28.5 | 74.5 | −20.3 | −3.4 | −9.9 |
| 254 | CCCAATCTTTATCATTGCCT | SEQ ID NO:1884 | −4.8 | −25.1 | 70.3 | −19.8 | −0.1 | −3.4 |
| 431 | GGGGGTGGCTATTGACAGGA | SEQ ID NO:1885 | −4.8 | −27 | 77.1 | −22.2 | 0 | −3.7 |
| 838 | GGTTGTGCTGTCCACACGAG | SEQ ID NO:1886 | −4.8 | −27.2 | 76.8 | −20.4 | −2 | −7.2 |
| 839 | AGGTTGTGCTGTCCACACGA | SEQ ID NO:1887 | −4.8 | −27.2 | 76.8 | −20.4 | −2 | −7.2 |
| 980 | GATGGATAGAAAGACGTCCA | SEQ ID NO:1888 | −4.8 | −21.2 | 61.7 | −15.1 | −1.2 | −8.6 |
| 1105 | CTCTGGCTGCTCAAATATTT | SEQ ID NO:1889 | −4.8 | −22.4 | 66.1 | −17.6 | 0 | −5.8 |
| 1459 | ACTGCCAACTGTGTTTGTGA | SEQ ID NO:1890 | −4.8 | −24.4 | 70.8 | −19.6 | 0 | −3.3 |
| 1969 | CTTATCACAAATTACCACAG | SEQ ID NO:1891 | −4.8 | −18.9 | 57.3 | −14.1 | 0 | −3.2 |
| 2576 | CCAAGTATGAGCATACACTG | SEQ ID NO:1892 | −4.8 | −21.7 | 63.7 | −15.4 | −1.4 | −9.6 |
| 2705 | TAGATATAAATCCTACCAAT | SEQ ID NO:1893 | −4.8 | −17.5 | 54.1 | −11.9 | −0.6 | −2.7 |
| 2948 | CACTTTTAGGAGATGAAAAC | SEQ ID NO:1894 | −4.8 | −16.9 | 53.5 | −12.1 | 0 | −3 |
| 3035 | GTGTTGTGATTTTAAAGAAC | SEQ ID NO:1895 | −4.8 | −17 | 54.7 | −12.2 | 0 | −4.6 |
| 69 | AGTGGCTGGCGGGATCGGGG | SEQ ID NO:1896 | −4.7 | −30.7 | 82.1 | −25.1 | −0.7 | −6.3 |
| 147 | GTTCGAGGAACATGGTAGTT | SEQ ID NO:1897 | −4.7 | −22.5 | 66.9 | −16.3 | −1.4 | −6.5 |
| 515 | TTTCCAAAAACTTTTTCAAG | SEQ ID NO:1898 | −4.7 | −16.4 | 52.1 | −11.2 | −0.1 | −4.7 |
| 1679 | CGTCATCCATGCTCAGTACT | SEQ ID NO:1899 | −4.7 | −26 | 74.6 | −21.3 | 0 | |
| 1704 | AGTTCTGTTGCTAGTTTCTG | SEQ ID NO:1900 | −4.7 | −23 | 72.2 | −18.3 | 0 | −4.1 |
| 1707 | TAAAGTTCTGTTGCTAGTTT | SEQ ID NO:1901 | −4.7 | −20 | 62.8 | −15.3 | 0 | 4.1 |
| 2014 | CACCTTGATCGTTCTTTTTG | SEQ ID NO:1902 | −4.7 | −22.7 | 66.8 | −18 | 0 | −5.3 |
| 2167 | ATTTTGTATAGATATTCCTC | SEQ ID NO:1903 | −4.7 | −19 | 60.3 | −14.3 | 0 | −2.8 |
| 2360 | ATTATTCAAAGTCCTCCACA | SEQ ID NO:1904 | −4.7 | −22.1 | 64.9 | −17.4 | 0 | 2.5 |
| 2499 | TATGGTGAAACAAGTACCAA | SEQ ID NO:1905 | −4.7 | −18.6 | 56.2 | −12.3 | −1.6 | −6.5 |
| 2658 | TTTGATTTAAAAACAAAACA | SEQ ID NO:1906 | −4.7 | −11.6 | 42.4 | −6.4 | 0.2 | −8.4 |
| 2887 | AAATTTAAAATCATATTGTC | SEQ ID NO:1907 | −4.7 | −12.9 | 45.5 | −8.2 | 0 | −5 |
| 2979 | TAAAAGACTACAGATACAAG | SEQ ID NO:1908 | −4.7 | −14.4 | 48.2 | −9.7 | 0 | −2.2 |
| 2980 | ATAAAAGACTACAGATACAA | SEQ ID NO:1909 | −4.7 | −14.4 | 48.1 | −9.7 | 0 | −2.2 |
| 2981 | AATAAAAGACTACAGATACA | SEQ ID NO:1910 | −4.7 | −14.4 | 48.1 | −9.7 | 0 | −2.2 |
| 1207 | ACGCCGGCATCTCTGGATCT | SEQ ID NO:1911 | −4.6 | −29 | 78.3 | −22.8 | −0.9 | −11.3 |
| 1540 | GGTATAAGCCTTTGTACTGG | SEQ ID NO:1912 | 4.6 | −23.2 | 68.5 | −17.3 | −1.2 | −5.4 |
| 1571 | GGGCAAACATCACAAGGGAT | SEQ ID NO:1913 | −4.6 | −22.7 | 64.6 | −18.1 | 0 | −4 |
| 1947 | CGCCCCTGCCGAGCAACCAC | SEQ ID NO:1915 | −4.6 | −33.6 | 81.3 | −28.1 | −0.7 | −7.1 |
| 2454 | GATTGAAGTGGAGGGTCCAG | SEQ ID NO:1915 | −4.6 | −24.3 | 71 | −17.8 | −1.9 | −6.2 |
| 2655 | GATTTAAAAACAAAACAGAA | SEQ ID NO:1916 | −4.6 | −11.3 | 41.8 | −6.7 | 0 | −5 |
| 2659 | GTTTGATTTAAAAACAAAAC | SEQ ID NO:1917 | −4.6 | −12.1 | 43.5 | −6.4 | −0.9 | −9.2 |
| 2786 | TACTGTAATATTTCGCTTCC | SEQ ID NO:1918 | −4.6 | −21.3 | 63.6 | −16.7 | 0 | −4.2 |
| 2831 | ATAAAATTGTGCAAATATGT | SEQ ID NO:1919 | −4.6 | −14.9 | 49 | −10.3 | 0 | −6.1 |
| 3036 | TGTGTTGTGATTTTAAAGAA | SEQ ID NO:1920 | −4.6 | −16.8 | 54.1 | −12.2 | 0 | −4.6 |
| 829 | GTCCACACGAGAGAGATTGC | SEQ ID NO:1921 | −4.5 | −24.5 | 70.3 | −20 | 0 | −3.5 |
| 963 | CCATCCACTACTGCTGCAAC | SEQ ID NO:1922 | −4.5 | −26.4 | 72.8 | −21.9 | 0 | −7.3 |
| 1335 | ACTGGTGTGTTTCTGTCCAG | SEQ ID NO:1923 | −4.5 | −25.7 | 77.1 | −19.3 | −1.9 | −6.5 |
| 1406 | AACGAAGACCCATCAAAGTA | SEQ ID NO:1924 | −4.5 | −20.3 | 58.5 | −15.1 | −0.4 | −3.9 |
| 1743 | TAGCCTCGTCCCATTATCAG | SEQ ID NO:1925 | −4.5 | −26.8 | 75 | −22.3 | 0 | −3.2 |
| 1826 | ATTCACCAGCAAGGATGCCT | SEQ ID NO:1926 | −4.5 | −26.4 | 73.3 | −19.7 | −2.2 | −5.9 |
| 2168 | CATTTTGTATAGATATTCCT | SEQ ID NO:1927 | −4.5 | −19.3 | 60.2 | −14.8 | 0 | −2.8 |
| 2355 | TCAAAGTCCTCCACAAATTA | SEQ ID NO:1928 | −4.5 | −20.6 | 60.6 | −16.1 | 0 | −3.3 |
| 2546 | TAGATACTCCAATTAAATGC | SEQ ID NO:1929 | −4.5 | −17.7 | 55 | −13.2 | 0 | −3.5 |
| 2942 | TAGGAGATGAAAACACAAAG | SEQ ID NO:1930 | −4.5 | −15 | 48.9 | −10.5 | 0 | −2.5 |
| 2976 | AAGACTACAGATACAAGGAA | SEQ ID NO:1931 | −4.5 | −17.2 | 54 | −12.7 | 0 | −2.2 |
| 60 | CGGGATCGGGGGTGCACACA | SEQ ID NO:1932 | −4.4 | −29.3 | 77.7 | −24 | 0 | −9.8 |
| 372 | CCAAGGTGTACATCAAATTC | SEQ ID NO:1933 | −4.4 | −20.4 | 61 | −15.5 | 0 | −7.9 |
| 650 | CTTCCAATTGTTGGATAACT | SEQ ID NO:1934 | −4.4 | −20.7 | 61.7 | −13.6 | −2.7 | −8.2 |
| 1036 | CATCTGGAGTGTTTGCACAG | SEQ ID NO:1935 | −4.4 | −23.8 | 70.9 | −16.7 | −2.7 | −7.3 |
| 1180 | GTGATCCTTCAAACCACCCA | SEQ ID NO:1936 | −4.4 | −26.7 | 72.1 | −21.6 | −0.5 | −4.3 |
| 1218 | ATAAGAATCAAACGCCGGCA | SEQ ID NO:1937 | −4.4 | −21.9 | 60.5 | −15.8 | 0 | −11.6 |
| 1282 | CTCAGTCAGCTCCTCAAGAA | SEQ ID NO:1938 | −4.4 | −24.6 | 72.1 | −20.2 | 0 | −4.4 |
| 1283 | ACTCAGTCAGCTCCTCAAGA | SEQ ID NO:1939 | −4.4 | −25.5 | 75.3 | −21.1 | 0 | −4.4 |
| 1619 | TCTCTTTGCGTCTTTCTTGC | SEQ ID NO:1940 | −4.4 | −25.3 | 75.8 | −20.9 | 0 | −4 |
| 1736 | GTCCCATTATCAGAACTGAC | SEQ ID NO:1941 | −4.4 | −23 | 67.1 | −18.1 | −0.1 | −7.6 |
| 1836 | CCATGTTTCAATTCACCAGC | SEQ ID NO:1942 | −4.4 | −24.4 | 69.8 | −20 | 0 | −4.3 |
| 2273 | TATATAAATAAGGATTTACT | SEQ ID NO:1943 | −4.4 | −13.5 | 46.8 | −7.7 | −1.3 | −6.3 |
| 2431 | TGCAACACCCAGCATTCTTT | SEQ ID NO:1944 | −4.4 | −25.7 | 71.6 | −20.4 | −0.8 | −4.8 |
| 2504 | TGAAGTATGGTGAAACAAGT | SEQ ID NO:1945 | −4.4 | −17.8 | 55.5 | −12.4 | −0.9 | −3.9 |
| 3037 | CTGTGTTGTGATTTTAAAGA | SEQ ID NO:1946 | −4.4 | −18.4 | 58 | −14 | 0 | −4.6 |
| 62 | GGCGGGATCGGGGGTGCACA | SEQ ID NO:1947 | −4.3 | −31.4 | 82.7 | −25.5 | −0.7 | −11.1 |
| 80 | GGCCAGGGGCGAGTGGCTGG | SEQ ID NO:1948 | −4.3 | −32.8 | 87.5 | −25.2 | −3.3 | −9.8 |
| 340 | CATATCTTGTTGCTTGTGAA | SEQ ID NO:1949 | −4.3 | −21 | 63.9 | −16.7 | 0 | −3.6 |
| 511 | CAAAAACTTTTTCAAGTCTT | SEQ ID NO:1950 | −4.3 | −16.4 | 52.6 | −11.2 | −0.8 | −4.9 |
| 576 | TACTTAACGAGCTTGGCAAT | SEQ ID NO:1951 | −4.3 | −21.3 | 62 | −16.1 | −0.7 | −6.5 |
| 594 | TCCCGATTGTCATACATATA | SEQ ID NO:1952 | −4.3 | −22.2 | 64.4 | −17.9 | 0 | −4.4 |
| 1164 | CCCAAATTCACAGTATAGTC | SEQ ID NO:1953 | −4.3 | −21.6 | 64 | −17.3 | 0 | −3.1 |
| 1443 | GTGATCCCCACAGTTAAAGC | SEQ ID NO:1954 | −4.3 | −25.2 | 70.8 | −19.6 | −1.2 | −5.2 |
| 1653 | ATCAAATCAGGCAGCCGTTT | SEQ ID NO:1955 | −4.3 | −24.5 | 69.1 | −19.4 | −0.3 | −9 |
| 1708 | ATAAAGTTCTGTTGCTAGTT | SEQ ID NO:1956 | −4.3 | −19.9 | 62.4 | −15.6 | 0 | −4.1 |
| 1829 | TCAATTCACCAGCAAGGATG | SEQ ID NO:1957 | −4.3 | −22.1 | 64.2 | −17 | −0.6 | −4.9 |
| 1833 | TGTTTCAATTCACCAGCAAG | SEQ ID NO:1958 | −4.3 | −21.7 | 64.2 | −17.4 | 0 | −4.1 |
| 1894 | GTGATCTCTCATGATGATCA | SEQ ID NO:1959 | −4.3 | −21.8 | 66.8 | −14.7 | −2.7 | −12.9 |
| 1964 | CACAAATTACCACAGGCCGC | SEQ ID NO:1960 | −4.3 | −25.4 | 68.1 | −20.6 | 0 | −7.7 |
| 2141 | CAGTCACAGATTTGGCAAGA | SEQ ID NO:1961 | −4.3 | −22.3 | 66.2 | −18 | 0 | −4.1 |
| 2399 | AGCTAGAATCTTTCTGATAC | SEQ ID NO:1962 | −4.3 | −19.6 | 61.4 | −14.4 | −0.7 | −6.9 |
| 2442 | GGGTCCAGAAATGCAACACC | SEQ ID NO:1963 | −4.3 | −24.8 | 68.5 | −19.4 | −1 | −5.6 |
| 2801 | GACCCACCAATGCACTACTG | SEQ ID NO:1964 | −4.3 | −26.1 | 70.7 | −21.8 | 0 | 5.5 |
| 2883 | TTAAAATCATATTGTCAGTT | SEQ ID NO:1965 | −4.3 | −16.2 | 52.9 | −11.9 | 0 | −2.1 |
| 2957 | AATAAAAAACACTTTTAGGA | SEQ ID NO:1966 | −4.3 | −13.3 | 45.8 | −7.8 | −1.1 | −3.6 |
| 3052 | AATTTAATAGCAGCTCTGTG | SEQ ID NO:1967 | −4.3 | −19.9 | 61.2 | −15.6 | 0 | −6.1 |
| 146 | TTCGAGGAACATGGTAGTTT | SEQ ID NO:1968 | −4.2 | −21.4 | 64.1 | −17.2 | 0 | −7.2 |
| 459 | ATAAATTCATTATTTTTATC | SEQ ID NO:1969 | −4.2 | −13.8 | 48 | −9.1 | −0.2 | −4.9 |
| 683 | AATGAACACTTTTAAACACA | SEQ ID NO:1970 | −4.2 | −15.6 | 50.2 | −11.4 | 0 | −4.4 |
| 825 | ACACGAGAGAGATTOCAGCT | SEQ ID NO:1971 | −4.2 | −23.6 | 68.3 | −19.4 | 0 | −5.3 |
| 905 | CTATGACAGCACTTGCATCA | SEQ ID NO:1972 | −4.2 | −23.4 | 68.5 | −18.3 | −0.7 | −7.7 |
| 926 | GATGACGCGATTGGTGTGT | SEQ ID NO:1973 | −4.2 | −24.3 | 69.2 | −19.6 | −0.1 | −7.9 |
| 981 | GATGGATAGAAAGACGTCC | SEQ ID NO:1974 | −4.2 | −21.3 | 61 | −16.5 | 0 | −8.6 |
| 1444 | TGTGATCCCCACAGTTAAAG | SEQ ID NO:1975 | −4.2 | −23.4 | 66.6 | −17.3 | −1.9 | −7.8 |
| 1903 | GGCATAAGTGTGATCTCTCA | SEQ ID NO:1976 | −4.2 | −23.4 | 70.5 | −18.7 | −0.2 | −6.5 |
| 2480 | ATTTTTAGAAACATATTGTC | SEQ ID NO:1977 | −4.2 | −15.6 | 51.8 | −10.9 | −0.2 | −3.1 |
| 143 | GAGGAACATGGTAGTTTAAG | SEQ ID NO:1978 | −4.1 | −19.1 | 59.3 | −15 | 0 | −5.2 |
| 231 | TCAAATCCCACACCAGCAGA | SEQ ID NO:1979 | −4.1 | −25.7 | 70.2 | −21.6 | 0 | −4.1 |
| 832 | GCTGTCCACACGAGAGAGAT | SEQ ID NO:1980 | −4.1 | −25.3 | 71.9 | −21.2 | 0 | −3.5 |
| 846 | AAAAGGCAGGTTGTGCTGTC | SEQ ID NO:1981 | −4.1 | −23.6 | 69.5 | −18 | −1.4 | −4.7 |
| 849 | GGGAAAAGGCAGGTTGTGCT | SEQ ID NO:1982 | −4.1 | −25 | 71.2 | −18.7 | −2.2 | −5.2 |
| 1405 | ACGAAGACCCATCAAAGTAT | SEQ ID NO:1983 | −4.1 | −21 | 60.2 | −16.9 | 0.4 | −3.9 |
| 1409 | AGTAACGAAGACCCATCAAA | SEQ ID NO:1984 | −4.1 | −20.3 | 58.5 | −15.5 | −0.4 | −3.3 |
| 1702 | TTCTGTTGCTAGTTTCTGAA | SEQ ID NO:1985 | −4.1 | −21.7 | 67.1 | −17.6 | 0 | −4.4 |
| 1739 | CTCGTCCCATTATCAGAACT | SEQ ID NO:1986 | −4.1 | −24.3 | 69 | −20.2 | 0 | −3 |
| 2091 | AGCACAGCAAGGTGGAAAGC | SEQ ID NO:1987 | −4.1 | −23.8 | 68.3 | −18.8 | −0.7 | −5.5 |
| 2322 | AGAGGTAACTTCACAAAAAT | SEQ ID NO:1988 | −4.1 | −16.4 | 52.2 | −11 | −1.2 | −4.4 |
| 2352 | AAGTCCTCCACAAATTACTG | SEQ ID NO:1989 | −4.1 | −21.3 | 62.3 | −17.2 | 0 | −3.2 |
| 2495 | GTGAAACAAGTACCAATTTT | SEQ ID NO:1990 | −4.1 | −18 | 55.3 | −13.4 | −0.1 | −4.6 |
| 2543 | ATACTCCAATTAAATGCACT | SEQ ID NO:1991 | −4.1 | −19.2 | 57.7 | −15.1 | 0 | 5.5 |
| 2622 | TAAATCACATCTTCTCTTAA | SEQ ID NO:1992 | −4.1 | −17.4 | 55.5 | −13.3 | 0 | −2 |
| 2828 | AAATTGTGCAAATATGTTAA | SEQ ID NO:1993 | −4.1 | −15 | 49.3 | −10.9 | 0 | −6.1 |
| 2839 | TTTGTGCTATAAAATTGTGC | SEQ ID NO:1994 | −4.1 | −18.5 | 57.4 | −14.4 | 0 | −3.4 |
| 72 | GCGAGTGGCTGGCGGGATCG | SEQ ID NO:1995 | −4 | −30.3 | 79.7 | −25.3 | −0.9 | −7.1 |
| 149 | TCGTTCGAGGAACATGGTAG | SEQ ID NO:1996 | −4 | −22.4 | 65.1 | −16.5 | −1.9 | −6.7 |
| 222 | ACACCAGCAGAATCATATCC | SEQ ID NO:1997 | −4 | −23.4 | 67.2 | −19.4 | 0 | −4.1 |
| 344 | AATCCATATCTTGTTGCTTG | SEQ ID NO:1998 | −4 | −21.6 | 64.8 | −17.6 | 0 | −3.6 |
| 521 | CTTTGCTTTCCAAAAACTTT | SEQ ID NO:1999 | −4 | −19.6 | 58.6 | −14.5 | −1 | −4.2 |
| 622 | CAAGGTAGTAAAGCTGGTAT | SEQ ID NO:2000 | −4 | −20.4 | 62 | −16.4 | 0 | −5.1 |
| 731 | CAATCAACAGAGGGCTACCT | SEQ ID NO:2001 | −4 | −23.8 | 67.6 | −18.4 | −1.3 | −4.2 |
| 733 | ACCAATCAACAGAGGGCTAC | SEQ ID NO:2002 | −4 | −23.1 | 66.3 | −19.1 | 0 | −3.7 |
| 750 | TTATGTTCACTCCGTACACC | SEQ ID NO:2003 | −4 | −24.5 | 70.3 | −20.5 | 0 | −4.8 |
| 827 | CCACACGAGAGAGATTGCAG | SEQ ID NO:2004 | −4 | −23.6 | 67 | −19.6 | 0 | −5.2 |
| 830 | TGTCCACACGAGAGAGATTG | SEQ ID NO:2005 | −4 | −22.7 | 66 | −18.7 | 0 | −3.5 |
| 1424 | CTCCTCTCTCCTTACAGTAA | SEQ ID NO:2006 | −4 | −25 | 73.5 | 21 | 0 | −4.5 |
| 1513 | AATCTCAGGACCAGCATTAA | SEQ ID NO:2007 | −4 | −22 | 64.5 | −18 | 0 | 4.1 |
| 1742 | AGCCTCGTCCCATTATCAGA | SEQ ID NO:2008 | −4 | −27.7 | 76.9 | −23.7 | 0 | −3.2 |
| 2282 | TATAACTGATATATAAATAA | SEQ ID NO:2009 | −4 | −11.1 | 41.8 | −7.1 | 0 | −4.2 |
| 2451 | TGAAGTGGAGGGTCCAGAAA | SEQ ID NO:2010 | −4 | −22.8 | 66.1 | 17.3 | 1.4 | 5.7 |
| 2541 | ACTCCAATTAAATGCACTAC | SEQ ID NO:2011 | −4 | −19.4 | 58.2 | −15.4 | 0 | −5.5 |
| 2627 | CAAAATAAATCACATCTTCT | SEQ ID NO:2012 | −4 | −15.6 | 50.5 | −11.6 | 0 | −1.2 |
| 2723 | ACTAAGGCTAACCAAACTTA | SEQ ID NO:2013 | −4 | −19.4 | 57.8 | −14.7 | −0.5 | −3.9 |
| 2915 | ATACCCAACATGTACACATC | SEQ ID NO:2015 | −4 | −21.9 | 63.5 | −17.9 | 0 | −7 |
| 71 | CGAGTGGCTGGCGGGATCGG | SEQ ID NO:2015 | −3.9 | −29.7 | 78.1 | −24.9 | −0.7 | −6.4 |
| 195 | TCCAGTCTCTGAAGGCCTTT | SEQ ID NO:2016 | −3.9 | −26.9 | 77.4 | −21.5 | −0.3 | 10.9 |
| 370 | AAGGTGTACATCAAATTCTA | SEQ ID NO:2017 | −3.9 | −18.3 | 57.3 | −13.9 | 0 | 7.9 |
| 509 | AAAACTTTTTCAAGTCTTTG | SEQ ID NO:2018 | −3.9 | −16.5 | 53.4 | −11.2 | −1.3 | −4.7 |
| 764 | GATCAGTAGAAAGTTTATGT | SEQ ID NO:2019 | −3.9 | −18.1 | 58 | −14.2 | 0 | −4.7 |
| 906 | TCTATGACAGCACTTGCATC | SEQ ID NO:2020 | −3.9 | −23.1 | 68.9 | −18.3 | −0.7 | −7 |
| 947 | CAACATCATCATCTTCCAGA | SEQ ID NO:2021 | −3.9 | −22.2 | 65.6 | −18.3 | 0 | −2.7 |
| 1175 | CCTTCAAACCACCCAAATTC | SEQ ID NO:2022 | −3.9 | −23.6 | 64.4 | −19.7 | 0 | −3.1 |
| 1261 | TTGACGTGTTGCTACACCAG | SEQ ID NO:2023 | −3.9 | −24.4 | 69.6 | −18.9 | −1.6 | −5.1 |
| 1393 | CAAAGTATCTGCTGTCTCAC | SEQ ID NO:2024 | −3.9 | −22 | 66.6 | −18.1 | 0 | −3.6 |
| 1425 | GCTCCTCTCTCCTTACAGTA | SEQ ID NO:2025 | −3.9 | −27.5 | 80.9 | −23.6 | 0 | −3.2 |
| 1695 | GCTAGTTTCTGAATTTCGTC | SEQ ID NO:2026 | −3.9 | −22 | 67.1 | −18.1 | 0 | −5 |
| 1918 | AGCATTCTGACACTTGGCAT | SEQ ID NO:2027 | −3.9 | −24.3 | 70.9 | −19.8 | −0.3 | −4.1 |
| 2020 | GTGGGGCACCTTGATCGTTC | SEQ ID NO:2028 | −3.9 | −28 | 78.8 | −22.1 | −2 | −10.7 |
| 2078 | GGAAAGCCAGCAACTGTAAA | SEQ ID NO:2029 | −3.9 | −21.3 | 61.1 | −16.8 | −0.3 | −4.9 |
| 2093 | TCAGCACAGCAAGGTGGAAA | SEQ ID NO:2030 | −3.9 | −23.1 | 66.6 | −18.3 | −0.7 | −5.5 |
| 2182 | CATACAGTTTCGTACATTTT | SEQ ID NO:2031 | −3.9 | −20 | 61.3 | −15.6 | −0.1 | −4.8 |
| 2408 | GAAAATAATAGCTAGAATCT | SEQ ID NO:2032 | −3.9 | −14.8 | 49.1 | −10.9 | 0 | −6.3 |
| 2824 | TGTGCAAATATGTTAAGGAT | SEQ ID NO:2033 | −3.9 | −16.1 | 56.2 | 14.2 | 0 | 5.4 |
| 2830 | TAAAATTGTGCAAATATGTT | SEQ ID NO:2034 | −3.9 | −15 | 49.3 | −11.1 | 0 | −5.6 |
| 66 | GGCTGGCGGGATCGGGGGTG | SEQ ID NO:2035 | −3.8 | −31.9 | 84.3 | −27.2 | −0.7 | −6.3 |
| 224 | CCACACCAGCAGAATCATAT | SEQ ID NO:2036 | −3.8 | −23.7 | 66.9 | −19.9 | 0 | −4.1 |
| 253 | CCAATCTTTATCATTGCCTC | SEQ ID NO:2037 | −3.8 | −23.5 | 68.2 | −19.2 | −0.1 | −3.4 |
| 467 | GAATAACGATAAATTCATTA | SEQ ID NO:2038 | −3.8 | −13.8 | 46.7 | −9.1 | −0.7 | −4 |
| 841 | GCAGGTTGTGCTGTCCACAC | SEQ ID NO:2039 | −3.8 | −28.3 | 81.5 | −22.5 | −2 | −7.8 |
| 1423 | TCCTCTCTCCTTACAGTAAC | SEQ ID NO:2040 | −3.8 | −24.3 | 72.1 | −20.5 | 0 | −4.7 |
| 1483 | ACAATCTGTCTCCCGTGATA | SEQ ID NO:2041 | −3.8 | −24.7 | 70.2 | −20.9 | 0 | −3.3 |
| 1572 | AGGGCAAACATCACAAGGGA | SEQ ID NO:2042 | −3.8 | −22.7 | 64.8 | −18.9 | 0 | −4 |
| 2356 | TTCAAAGTCCTCCACAAATT | SEQ ID NO:2043 | −3.8 | −21 | 61.4 | −17.2 | 0 | −2.9 |
| 2767 | CTAAATTTCTTCCACCTACA | SEQ ID NO:2044 | −3.8 | −21.6 | 63.2 | −17.8 | 0 | −4.9 |
| 3041 | AGCTCTGTGTTGTGATTTTA | SEQ ID NO:2045 | −3.8 | −22.3 | 69.2 | −18.5 | 0 | −4.3 |
| 691 | CCGGGAAAATGAACACTTT | SEQ ID NO:2046 | −3.7 | −21.8 | 60.3 | −17.3 | 0 | −9.2 |
| 693 | TGCCCGGGAAAATGAACACT | SEQ ID NO:2047 | −3.7 | −23.4 | 63.2 | −18.5 | 0 | −10.3 |
| 776 | GTATAGGAATGTGATCAGTA | SEQ ID NO:2048 | −3.7 | −19.5 | 61.2 | −15.8 | 0 | −7.4 |
| 1115 | TCACGACAGACTCTGGCTGC | SEQ ID NO:2049 | −3.7 | −26.3 | 74.6 | −21.7 | −0.7 | −6.8 |
| 1172 | TCAAACCACCCAAATTCACA | SEQ ID NO:2050 | −3.7 | −22.2 | 61.7 | 18.5 | 0 | 3.1 |
| 1227 | CCACAAGCAATAAGAATCAA | SEQ ID NO:2051 | −3.7 | −18 | 54.3 | −14.3 | 0 | −4.1 |
| 1403 | GAAGACCCATCAAAGTATCT | SEQ ID NO:2052 | −3.7 | −21.3 | 62.4 | −16.9 | −0.4 | −3.2 |
| 1410 | CAGTAACGAAGACCCATCAA | SEQ ID NO:2053 | −3.7 | −21.7 | 61.4 | −17.3 | −0.4 | −3.9 |
| 1770 | GCCCCTTCAAGACAAGTAGC | SEQ ID NO:2054 | −3.7 | −26.7 | 74.1 | −23 | 0 | −2.8 |
| 1803 | GAGTGCATATAAGTAATTTC | SEQ ID NO:2055 | −3.7 | −17.8 | 56.9 | −13.6 | −0.2 | −6.1 |
| 2178 | CAGTTTCGTACATTTTGTAT | SEQ ID NO:2056 | −3.7 | −20.3 | 62.6 | −15.7 | −0.8 | −4.8 |
| 2283 | TTATAACTGATATATAAATA | SEQ ID NO:2057 | −3.7 | −11.9 | 43.5 | −8.2 | 0 | −4.2 |
| 2606 | TTAAAACTTGGCAAACCCTT | SEQ ID NO:2058 | −3.7 | −20.4 | 58.7 | −16 | −0.5 | −4 |
| 2612 | CTTCTCTTAAAACTTGGCAA | SEQ ID NO:2059 | −3.7 | −19.5 | 59 | −15.8 | 0 | −4 |
| 2734 | AAGTCTGAGAAACTAAGGCT | SEQ ID NO:2060 | −3.7 | −19.6 | 59.6 | −15.9 | 0 | −3.7 |
| 63 | TGGCGGGATCGGGGGTGCAC | SEQ ID NO:2061 | −3.6 | −30.7 | 81.5 | −26 | −0.7 | −9.9 |
| 664 | AAGTGCAAAAGCACCTTCCA | SEQ ID NO:2062 | −3.6 | −23.7 | 66.2 | −17.7 | −2.4 | −9 |
| 665 | CAAGTGCAAAAGCACCTTCC | SEQ ID NO:2063 | −3.6 | −23.7 | 66.2 | −17.7 | −2.4 | −9 |
| 677 | CACTTTTAAACACAAGTGCA | SEQ ID NO:2064 | −3.6 | −19.2 | 58 | −14 | −1.5 | −7 |
| 735 | ACACCAATCAACAGAGGGCT | SEQ ID NO:2065 | −3.6 | −24.1 | 68 | −20.5 | 0 | −3.7 |
| 828 | TCCACACGAGAGAGATTGCA | SEQ ID NO:2066 | −3.6 | −24 | 68.2 | −20.4 | 0 | −4.8 |
| 894 | CTTGCATCAGAAGCAAAGTA | SEQ ID NO:2067 | −3.6 | −20.5 | 61.5 | −15 | −1.9 | −8.8 |
| 907 | TTCTATGACAGCACTTGCAT | SEQ ID NO:2068 | −3.6 | −22.8 | 67.7 | −18.3 | −0.7 | −7 |
| 915 | TTGGTGTGTTCTATGACAGC | SEQ ID NO:2069 | −3.6 | −23.3 | 71 | −19.2 | −0.1 | −3.9 |
| 1235 | AACTTGTTCCACAAGCAATA | SEQ ID NO:2070 | −3.6 | −20.6 | 60.9 | −14.1 | −2.9 | −8.2 |
| 1482 | CAATCTGTCTCCCGTGATAT | SEQ ID NO:2071 | −3.6 | −24.5 | 69.6 | −20.9 | 0 | −3.3 |
| 1609 | TCTTTCTTGCATGGAGATCC | SEQ ID NO:2072 | −3.6 | −24.2 | 71.8 | −20.6 | 0 | −5.3 |
| 1629 | CCAAGCATGATCTCTTTGCG | SEQ ID NO:2073 | −3.6 | −24.5 | 69 | −19.2 | −1.7 | −6.4 |
| 1631 | ATCCAAGCATGATCTCTTTG | SEQ ID NO:2074 | −3.6 | −22.3 | 66.2 | −18.7 | 0 | −4.9 |
| 1696 | TGCTAGTTTCTGAATTTCGT | SEQ ID NO:2075 | −3.6 | −21.6 | 65.4 | −18 | 0 | −5 |
| 1942 | CTGCCGAGCAACCACTTGCT | SEQ ID NO:2076 | −3.6 | −28.7 | 76 | −21.7 | −3.4 | −9.8 |
| 2038 | CTGCAAGCAGTCCACTGAGT | SEQ ID NO:2077 | −3.6 | −26.4 | 75.7 | −22 | −0.5 | −8.5 |
| 2392 | ATCTTTCTGATACAGATTCC | SEQ ID NO:2078 | −3.6 | −21.1 | 64.8 | −16.5 | −0.9 | −5.9 |
| 2905 | TGTACACATCCCATCTTCAA | SEQ ID NO:2079 | −3.6 | −23.6 | 68.1 | −20 | 0 | −5.9 |
| 232 | ATCAAATCCCACACCAGCAG | SEQ ID NO:2080 | −3.5 | −25.1 | 69 | −21.6 | 0 | −4.1 |
| 259 | GGCTTCCCAATCTTTATCAT | SEQ ID NO:2081 | −3.5 | −24.7 | 71 | −20.7 | −0.1 | −3.7 |
| 369 | AGGTGTACATCAAATTCTAT | SEQ ID NO:2082 | −3.5 | −19 | 59.3 | −15 | 0 | −7.9 |
| 1486 | TCCACAATCTGTCTCCCGTG | SEQ ID NO:2083 | −3.5 | −27.5 | 75.7 | −24 | 0 | −4 |
| 1544 | GGCTGGTATAAGCCTTTGTA | SEQ ID NO:2084 | −3.5 | −24.8 | 72.3 | −18.8 | −2.5 | −8.7 |
| 2430 | GCAACACCCAGCATTCTTTA | SEQ ID NO:2085 | −3.5 | −25.4 | 71.2 | −21.4 | −0.1 | −4.2 |
| 2653 | TTTAAAAACAAAACAGAAAC | SEQ ID NO:2086 | −3.5 | −10.2 | 39.9 | −6.7 | 0 | −4 |
| 2911 | CCAACATGTACACATCCCAT | SEQ ID NO:2087 | −3.5 | −24.7 | 68.1 | −21.2 | 0 | −7 |
| 2977 | AAAGACTACAGATACAAGGA | SEQ ID NO:2088 | −3.5 | −17.2 | 54 | −13.7 | 0 | −2 |
| 639 | TGGATAACTCTCTCCACCAA | SEQ ID NO:2089 | −3.4 | −23.8 | 67.7 | −19.3 | −1 | −4.8 |
| 666 | ACAAGTGCAAAAGCACCTTC | SEQ ID NO:2090 | −3.4 | −21.9 | 63.3 | −16.1 | −2.4 | −9 |
| 890 | CATCAGAAGCAAAGTAATAC | SEQ ID NO:2091 | −3.4 | −16.9 | 53.5 | −13.5 | 0 | −4.1 |
| 965 | GTCCATCCACTACTGCTGCA | SEQ ID NO:2092 | −3.4 | −28.5 | 79.8 | −25.1 | 0 | −7.1 |
| 1178 | GATCCTTCAAACCACCCAAA | SEQ ID NO:2093 | −3.4 | −24.1 | 65.2 | −20.7 | 0 | −3.3 |
| 1184 | TTATGTGATCCTTCAAACCA | SEQ ID NO:2094 | −3.4 | −21.6 | 63.2 | −18.2 | 0 | −5.5 |
| 1714 | CTGATGATAAAGTTCTGTTG | SEQ ID NO:2095 | −3.4 | −18.3 | 57.6 | −14.9 | 0 | −2.5 |
| 1923 | TGAAGAGCATTCTGACACTT | SEQ ID NO:2096 | −3.4 | −21.1 | 63.5 | −16.7 | −0.9 | −5.2 |
| 2293 | AGTGGAATAATTATAACTGA | SEQ ID NO:2097 | −3.4 | −15.8 | 51.4 | −12.4 | 0 | −6.2 |
| 2323 | AAGAGGTAACTTCACAAAAA | SEQ ID NO:2098 | −3.4 | −15.7 | 50.5 | −11 | −1.2 | −4.4 |
| 2611 | TTCTCTTAAAACTTGGCAAA | SEQ ID NO:2099 | −3.4 | −17.9 | 55.3 | −14.5 | 0 | −4 |
| 2660 | AGTTTGATTTAAAAACAAAA | SEQ ID NO:2100 | −3.4 | −11.9 | 43.1 | −6.8 | −1.7 | −9.2 |
| 2724 | AACTAAGGCTAACCAAACTT | SEQ ID NO:2101 | −3.4 | −19 | 56.6 | −14.2 | −1.3 | −4.2 |
| 295 | TCCTTTCTTCTTAATAAGCT | SEQ ID NO:2102 | −3.3 | −21 | 64 | −17.7 | 0 | −5.1 |
| 1460 | AACTGCCAACTGTGTTTGTG | SEQ ID NO:2103 | −3.3 | −23.1 | 67.2 | −19.8 | 0 | −3.3 |
| 1546 | CTGGCTGGTATAAGCCTTTG | SEQ ID NO:2104 | −3.3 | −24.8 | 71.3 | −18.3 | −3.2 | −9.5 |
| 1863 | ATCAATTTATCCACCAAAGC | SEQ ID NO:2105 | −3.3 | −20.7 | 60.6 | −17.4 | 0 | −2.8 |
| 2165 | TTTGTATAGATATTCCTCAC | SEQ ID NO:2106 | −3.3 | −19.8 | 61.9 | −16.5 | 0 | −2.8 |
| 2333 | GGGAAAATGTAAGAGGTAAC | SEQ ID NO:2107 | −3.3 | −17.3 | 54.1 | −14 | 0 | −1.9 |
| 2441 | GGTCCAGAAATGCAACACCC | SEQ ID NO:2108 | −3.3 | −25.6 | 69.5 | −21.2 | −1 | −5.6 |
| 2614 | ATCTTCTCTTAAAACTTGGC | SEQ ID NO:2109 | −3.3 | −19.9 | 61.1 | −16.6 | 0 | −2.8 |
| 2654 | ATTTAAAAACAAAACAGAAA | SEQ ID NO:2110 | −3.3 | −10 | 39.5 | −6.7 | 0 | −5 |
| 2959 | GAAATAAAAAACACTTTTAG | SEQ ID NO:2111 | −3.3 | −11.4 | 42.2 | −6.9 | −1.1 | −3.7 |
| 2982 | AAATAAAAGACTACAGATAC | SEQ ID NO:2112 | −3.3 | −13 | 45.3 | −9.7 | 0 | −2.2 |
| 347 | CCAAATCCATATCTTGTTGC | SEQ ID NO:2113 | −3.2 | −22.6 | 65.4 | −19.4 | 0 | −2.8 |
| 563 | TGGCAATTGTCTCTGTGTCT | SEQ ID NO:2115 | −3.2 | −24.6 | 74 | −20.9 | 0 | −8.3 |
| 564 | TTGGCAATTGTCTCTGTGTC | SEQ ID NO:2115 | −3.2 | −23.8 | 72.3 | −20.1 | 0 | −8.3 |
| 591 | CGATTGTCATACATATACTT | SEQ ID NO:2116 | −3.2 | −19 | 58.4 | −15.8 | 0 | −4.4 |
| 701 | CAACTGCTTGCCCGGGAAAA | SEQ ID NO:2117 | −3.2 | −25.4 | 67 | −20.6 | 0 | −11.4 |
| 1278 | GTCAGCTCCTCAAGAACTTG | SEQ ID NO:2118 | −3.2 | −23.8 | 69.9 | −20.6 | 0 | −6.9 |
| 1506 | GGACCAGCATTAATATGAAC | SEQ ID NO:2119 | −3.2 | −20.1 | 59.7 | −16.2 | −0.4 | −4.2 |
| 1519 | CACACCAATCTCAGGACCAG | SEQ ID NO:2120 | −3.2 | −24.9 | 69.7 | −21.7 | 0 | −3.7 |
| 1612 | GCGTCTTTCTTGCATGGAGA | SEQ ID NO:2121 | −3.2 | −25.6 | 74.2 | −22.4 | 0 | −5.1 |
| 1616 | CTTTGCGTCTTTCTTGCATG | SEQ ID NO:2122 | −3.2 | −24.3 | 71.1 | −20.1 | −0.9 | −5.1 |
| 1760 | GACAAGTAGCATAATGATAG | SEQ ID NO:2123 | 3.2 | −17.5 | 55.3 | −14.3 | 0 | −4.1 |
| 1838 | GGCCATGTTTCAATTCACCA | SEQ ID NO:2124 | −3.2 | −25.6 | 72 | −22.4 | 0 | −7 |
| 1862 | TCAATTTATCCACCAAAGCC | SEQ ID NO:2125 | −3.2 | −22.7 | 64.1 | −19.5 | 0 | −3.2 |
| 2171 | GTACATTTTGTATAGATATT | SEQ ID NO:2126 | −3.2 | −17.1 | 55.8 | −13 | −0.8 | −4.6 |
| 2180 | TACAGTTTCGTACATTTTGT | SEQ ID NO:2127 | −3.2 | −20.5 | 63.2 | −16.8 | −0.1 | −4.8 |
| 2181 | ATACAGTTTCGTACATTTTG | SEQ ID NO:2128 | −3.2 | −19.3 | 60 | −16.1 | 0.7 | −4.8 |
| 2391 | TCTTTCTGATACAGATTCCA | SEQ ID NO:2129 | −3.2 | −21.8 | 66 | −17.3 | −1.2 | −6.2 |
| 2453 | ATTGAAGTGGAGGGTCCAGA | SEQ ID NO:2130 | −3.2 | −24.3 | 71 | −19.2 | −1.9 | −6.2 |
| 2503 | GAAGTATGGTGAAACAAGTA | SEQ ID NO:2131 | −3.2 | −17.5 | 55 | −13.3 | −0.9 | 3.9 |
| 734 | CACCAATCAACAGAGGGCTA | SEQ ID NO:2132 | −3.1 | −23.6 | 66.9 | −20.5 | 0 | −3.7 |
| 833 | TGCTGTCCACACGAGAGAGA | SEQ ID NO:2133 | −3.1 | −25.3 | 71.8 | −22.2 | 0 | −3.6 |
| 908 | GTTCTATGACAGCACTTGCA | SEQ ID NO:2134 | −3.1 | −24 | 71.1 | −20 | −0.7 | −7 |
| 1265 | GAACTTGACGTGTTGCTACA | SEQ ID NO:2135 | −3.1 | −22.5 | 65.6 | −18.8 | −0.3 | −2.4 |
| 1396 | CATCAAAGTATCTGCTGTCT | SEQ ID NO:2136 | −3.1 | −21.8 | 66 | −18.7 | 0 | −3.6 |
| 2058 | GGGATCACGCTGAGAATGCC | SEQ ID NO:2137 | −3.1 | −26.1 | 71.8 | −22.5 | −0.1 | 5.3 |
| 2281 | ATAACTGATATATAAATAAG | SEQ ID NO:2138 | −3.1 | −11.4 | 42.4 | −8.3 | 0 | −4.2 |
| 2397 | CTAGAATCTTTCTGATACAG | SEQ ID NO:2139 | −3.1 | −18.5 | 58.5 | −14.5 | −0.7 | −6.3 |
| 2823 | GTGCAAATATGTTAAGGATT | SEQ ID NO:2140 | −3.1 | −18.2 | 56.6 | −15.1 | 0 | −5.4 |
| 230 | CAAATCCCACACCAGCAGAA | SEQ ID NO:2141 | −3 | −24.6 | 66.7 | −21.6 | 0 | −4.1 |
| 582 | TACATATACTTAACGAGCTT | SEQ ID NO:2142 | −3 | −18.6 | 57.1 | −15.6 | 0 | −5.2 |
| 1109 | CAGACTCTGGCTGCTCAAAT | SEQ ID NO:2143 | −3 | −24 | 69.3 | −21 | 0 | −6.4 |
| 1624 | CATGATCTCTTTGCGTCTTT | SEQ ID NO:2144 | −3 | −23.4 | 69.5 | −20.4 | 0 | −4.9 |
| 1678 | GTCATCCATGCTCAGTACTT | SEQ ID NO:2145 | −3 | −25.3 | 75.2 | −22.3 | 0 | −5.7 |
| 1832 | GTTTCAATTCACCAGCAAGG | SEQ ID NO:2146 | −3 | −22.9 | 66.9 | −19.4 | −0.2 | −4.7 |
| 1856 | TATCCACCAAAGCCAGAGGG | SEQ ID NO:2147 | −3 | −25.8 | 70.6 | −22.8 | 0 | −3.7 |
| 2330 | AAAATGTAAGAGGTAACTTC | SEQ ID NO:2148 | −3 | −15.7 | 51.3 | −11.4 | −1.2 | −3.8 |
| 2752 | CTACAGATAATAGACAACAA | SEQ ID NO:2149 | −3 | −15.8 | 51 | −12.8 | 0 | −2 |
| 2797 | CACCAATGCACTACTGTAAT | SEQ ID NO:2150 | −3 | −21.5 | 62.4 | −18.5 | 0 | −5.5 |
| 2958 | AAATAAAAAACACTTTTAGG | SEQ ID NO:2151 | −3 | −12 | 43.3 | −7.8 | −1.1 | −3.6 |
| 346 | CAAATCCATATCTTGTTGCT | SEQ ID NO:2152 | −2.9 | −21.5 | 63.6 | −18.6 | 0 | −3.6 |
| 581 | ACATATACTTAACGAGCTTG | SEQ ID NO:2153 | −2.9 | −18.9 | 57.6 | −16 | 0 | −6 |
| 694 | TTGCCCGGGAAAATGAACAC | SEQ ID NO:2154 | −2.9 | −22.6 | 61.8 | −18.5 | 0 | −10.3 |
| 729 | ATCAACAGAGGGCTACCTCG | SEQ ID NO:2155 | −2.9 | −25 | 70.3 | −18.2 | −3.9 | −8.5 |
| 955 | TACTGCTGCAACATCATCAT | SEQ ID NO:2156 | −2.9 | −22.4 | 65.8 | −19.5 | 0 | −7.3 |
| 1427 | AAGCTCCTCTCTCCTTACAG | SEQ ID NO:2157 | −2.9 | −25.9 | 75.4 | −23 | 0 | −5 |
| 1441 | GATCCCCACAGTTAAAGCTC | SEQ ID NO:2158 | −2.9 | −25.3 | 71.2 | −22.4 | 0 | −5 |
| 1611 | CGTCTTTCTTGCATGGAGAT | SEQ ID NO:2159 | −2.9 | −23.8 | 69.8 | −20.9 | 0 | −5.3 |
| 1759 | ACAAGTAGCATAATGATAGC | SEQ ID NO:2160 | −2.9 | −18.7 | 58 | −15.8 | 0 | −4.1 |
| 1827 | AATTCACCAGCAAGGATGCC | SEQ ID NO:2161 | −2.9 | −24.8 | 69.2 | −19.7 | −2.2 | −6.3 |
| 2023 | TGAGTGGGGCACCTTGATCG | SEQ ID NO:2162 | −2.9 | −26.9 | 74.7 | −22 | −2 | −10.7 |
| 2179 | ACAGTTTCGTACATTTTGTA | SEQ ID NO:2163 | −2.9 | −20.5 | 63.2 | −16.8 | −0.6 | −4.8 |
| 2327 | ATGTAAGAGGTAACTTCACA | SEQ ID NO:2164 | −2.9 | −19.4 | 60 | −15.2 | −1.2 | −6.2 |
| 2889 | TCAAATTTAAAATCATATTG | SEQ ID NO:2165 | −2.9 | −12.4 | 44.3 | −9.5 | 0 | −4.7 |
| 577 | ATACTTAACGAGCTTGGCAA | SEQ ID NO:2166 | −2.8 | −21.3 | 62 | −17.6 | −0.7 | −6.5 |
| 580 | CATATACTTAACGAGCTTGG | SEQ ID NO:2167 | −2.8 | −19.9 | 59.5 | −17.1 | 0 | −6.5 |
| 684 | AAATGAACACTTTTAAACAC | SEQ ID NO:2168 | −2.8 | −14.2 | 47.5 | −11.4 | 0 | −4.4 |
| 751 | TTTATGTTCACTCCGTACAC | SEQ ID NO:2169 | −2.8 | −22.6 | 66.9 | −19.8 | 0 | −4.8 |
| 1183 | TATGTGATCCTTCAAACCAC | SEQ ID NO:2170 | −2.8 | −21.7 | 63.4 | −18.2 | −0.5 | −5.5 |
| 2039 | CCTGCAAGCAGTCCACTGAG | SEQ ID NO:2171 | −2.8 | −27.2 | 75.8 | −23.5 | −0.5 | −9.3 |
| 2102 | ATAGCCTCTCAGCACAGCAA | SEQ ID NO:2172 | −2.8 | −26 | 74.3 | −22.3 | −0.7 | −4.8 |
| 2325 | GTAAGAGGTAACTTCACAAA | SEQ ID NO:2173 | −2.8 | −18 | 56.2 | −14.3 | −0.7 | −4.4 |
| 2474 | AGAAACATATTGTCTTCTCA | SEQ ID NO:2174 | −2.8 | −18.9 | 59.3 | −14.5 | −1.5 | −5.8 |
| 2575 | CAAGTATGAGCATACACTGC | SEQ ID NO:2175 | −2.8 | −21.5 | 64.1 | −17.2 | −1.4 | −9.6 |
| 106 | CATGATGCCGGAGACACGGC | SEQ ID NO:2176 | −2.7 | −27.2 | 72.3 | −20.8 | −3.7 | −11.1 |
| 895 | ACTTGCATCAGAAGCAAAGT | SEQ ID NO:2177 | −2.7 | −21 | 62.6 | −16.4 | −1.9 | −8.8 |
| 1217 | TAAGAATCAAACGCCGGCAT | SEQ ID NO:2178 | −2.7 | −21.9 | 60.5 | −17.5 | 0 | −11.6 |
| 1339 | AAAGACTGGTGTGTTTCTGT | SEQ ID NO:2179 | −2.7 | −21.8 | 66.5 | −18.2 | −0.8 | −3.5 |
| 1437 | CCCACAGTTAAAGCTCCTCT | SEQ ID NO:2180 | −2.7 | −26.5 | 73.7 | −23.8 | 0 | −5 |
| 2017 | GGGCACCTTGATCGTTCTTT | SEQ ID NO:2181 | −2.7 | −26.7 | 75.6 | −22.7 | −1.2 | −7.4 |
| 2106 | ACATCATAGCCTCTCAGCAC | SEQ ID NO:2182 | −2.7 | −25.5 | 74.4 | −21.9 | −0.7 | −4.1 |
| 2324 | TAAGAGGTAACTTCACAAAA | SEQ ID NO:2183 | −2.7 | −16.1 | 51.7 | −12.1 | −1.2 | 4.4 |
| 2432 | ATGCAACACCCAGCATTCTT | SEQ ID NO:2184 | −2.7 | −25.6 | 71.2 | −21.3 | −1.6 | 5.7 |
| 225 | CCCACACCAGCAGAATCATA | SEQ ID NO:2185 | −2.6 | −25.7 | 70.3 | 23.1 | 0 | −4.1 |
| 234 | CCATCAAATCCCACACCAGC | SEQ ID NO:2186 | −2.6 | −27.1 | 72 | −24.5 | 0 | −2.8 |
| 621 | AAGGTAGTAAAGCTGGTATC | SEQ ID NO:2187 | −2.6 | −20.1 | 62.2 | −17.5 | 0 | −5.1 |
| 669 | AACACAAGTGCAAAAGCACC | SEQ ID NO:2188 | −2.6 | −20.7 | 59.6 | −15.7 | −2.4 | −9 |
| 690 | CCGGGAAAATGAACACTTTT | SEQ ID NO:2189 | −2.6 | −19.9 | 57.4 | −17.3 | 0 | −5.6 |
| 739 | CCGTACACCAATCAACAGAG | SEQ ID NO:2190 | −2.6 | −22.7 | 63.6 | −20.1 | 0 | −4.8 |
| 775 | TATAGGAATGTGATCAGTAG | SEQ ID NO:2191 | −2.6 | −18.3 | 58.2 | −15.7 | 0 | 7.4 |
| 914 | TGGTGTGTTCTATGACAGCA | SEQ ID NO:2192 | −2.6 | −23.9 | 71.8 | −21.3 | 0.1 | 5.4 |
| 1107 | GACTCTGGCTGCTCAAATAT | SEQ ID NO:2193 | −2.6 | −23 | 67.3 | −20.4 | 0 | −6.1 |
| 1219 | AATAAGAATCAAACGCCGGC | SEQ ID NO:2194 | −2.6 | −20.5 | 57.8 | −16.8 | 0 | −10.2 |
| 1267 | AAGAACTTGACGTGTTGCTA | SEQ ID NO:2195 | −2.6 | −20.9 | 62 | −18.3 | 0 | −5.2 |
| 1485 | CCACAATCTGTCTCCCGTGA | SEQ ID NO:2196 | −2.6 | −27.7 | 75.3 | −25.1 | 0 | −4.2 |
| 1919 | GAGCATTCTGACACTTGGCA | SEQ ID NO:2197 | −2.6 | −24.9 | 72.3 | −21.7 | −0.3 | −4.1 |
| 2289 | GAATAATTATAACTGATATA | SEQ ID NO:2198 | −2.6 | −12.8 | 45.2 | −10.2 | 0 | −6.2 |
| 2372 | AATATAGATTCCATTATTCA | SEQ ID NO:2199 | −2.6 | −17.5 | 55.5 | −14.9 | 0 | −2.7 |
| 2545 | AGATACTCCAATTAAATGCA | SEQ ID NO:2200 | −2.6 | −18.7 | 56.7 | −16.1 | 0 | −5.2 |
| 2598 | TGGCAAACCCTTCCCTAACT | SEQ ID NO:2201 | −2.6 | −26.9 | 71.4 | −23.6 | −0.5 | −4 |
| 2604 | AAAACTTGGCAAACCCTTCC | SEQ ID NO:2202 | −2.6 | −23 | 63.4 | −19.7 | −0.5 | −4 |
| 2628 | TCAAAATAAATCACATCTTC | SEQ ID NO:2203 | −2.6 | −15.1 | 49.8 | −12.5 | 0 | −1.1 |
| 2818 | AATATGTTAAGGATTGAGAC | SEQ ID NO:2204 | −2.6 | −16.6 | 53.6 | −14 | 0 | −2.7 |
| 2832 | TATAAAATTGTGCAAATATG | SEQ ID NO:2205 | −2.6 | −13.4 | 46 | −10.8 | 0 | −6.1 |
| 590 | GATTGTCATACATATACTTA | SEQ ID NO:2206 | −2.5 | −17.9 | 57.2 | −15.4 | 0 | −3.9 |
| 692 | GCCCGGGAAAATGAACACTT | SEQ ID NO:2207 | −2.5 | −23.5 | 63.5 | −19.8 | 0 | −10.3 |
| 996 | GCAGTTCGTTTAATTCGATG | SEQ ID NO:2208 | −2.5 | −21.3 | 63.1 | −18.1 | −0.4 | −6 |
| 1212 | ATCAAACGCCGGCATCTCTG | SEQ ID NO:2209 | −2.5 | −25.6 | 69.3 | −21.4 | 0 | −11.6 |
| 1223 | AAGCAATAAGAATCAAACGC | SEQ ID NO:2210 | −2.5 | −16.5 | 51.2 | −14 | 0 | −4.1 |
| 1387 | ATCTGCTGTCTCACCTGATT | SEQ ID NO:2211 | −2.5 | −25.4 | 74.7 | −22.9 | 0 | −3.6 |
| 1399 | ACCCATCAAAGTATCTGCTG | SEQ ID NO:2212 | −2.5 | −23.5 | 67.4 | −21 | 0 | −3.6 |
| 1614 | TTGCGTCTTTCTTGCATGGA | SEQ ID NO:2213 | −2.5 | −25.1 | 72.8 | −21.6 | −0.9 | −5.1 |
| 1939 | CCGAGCAACCACTTGCTGAA | SEQ ID NO:2215 | −2.5 | −25.9 | 69.4 | −19.8 | −3.6 | −8.8 |
| 1943 | CCTGCCGAGCAACCACTTGC | SEQ ID NO:2215 | −2.5 | −29.8 | 77.4 | −25 | −2.3 | −7.6 |
| 1946 | GCCCCTGCCGAGCAACCACT | SEQ ID NO:2216 | −2.5 | −33.7 | 83.4 | −30.5 | −0.5 | −6.9 |
| 1950 | GGCCGCCCCTGCCGAGCAAC | SEQ ID NO:2217 | −2.5 | −35.7 | 85.9 | −31.4 | −1.8 | −8.3 |
| 2059 | AGGGATCACGCTGAGAATGC | SEQ ID NO:2218 | −2.5 | −24.1 | 68.6 | −21.6 | 0.4 | −5.3 |
| 2108 | CAACATCATAGCCTCTCAGC | SEQ ID NO:2219 | −2.5 | −24.6 | 71.3 | −22.1 | 0 | −3.2 |
| 2128 | GGCAAGATTCCGTGGGAAAT | SEQ ID NO:2220 | −2.5 | −23.7 | 66 | −19.7 | −1.4 | −6.8 |
| 2446 | TGGAGGGTCCAGAAATGCAA | SEQ ID NO:2221 | −2.5 | −23.5 | 66.7 | −19.4 | −1.5 | −8.5 |
| 2542 | TACTCCAATTAAATGCACTA | SEQ ID NO:2222 | −2.5 | −18.9 | 57.1 | −16.4 | 0 | −5.5 |
| 2769 | TCCTAAATTTCTTCCACCTA | SEQ ID NO:2223 | −2.5 | −23.1 | 66.5 | −20.6 | 0 | −4.9 |
| 522 | CCTTTGCTTTCCAAAAACTT | SEQ ID NO:2224 | −2.4 | −21.5 | 61.8 | −18 | −1 | −4.2 |
| 736 | TACACCAATCAACAGAGGGC | SEQ ID NO:2225 | −2.4 | −22.9 | 65.6 | −20.5 | 0 | −3.7 |
| 740 | TCCGTACACCAATCAACAGA | SEQ ID NO:2226 | −2.4 | −23.1 | 64.8 | −20.7 | 0 | −4.8 |
| 749 | TATGTTCACTCCGTACACCA | SEQ ID NO:2227 | −2.4 | −25.1 | 71 | −22.7 | 0 | −4.8 |
| 763 | ATCAGTAGAAAGTTTATGTT | SEQ ID NO:2228 | −2.4 | −17.6 | 56.9 | −15.2 | 0 | −4.6 |
| 1266 | AGAACTTGACGTGTTGCTAC | SEQ ID NO:2229 | −2.4 | −21.8 | 64.6 | −19.4 | 0 | −5.2 |
| 2791 | TGCACTACTGTAATATTTCG | SEQ ID NO:2230 | −2.4 | −19.7 | 59.8 | −17.3 | 0 | −6.8 |
| 2983 | AAAATAAAAGACTACAGATA | SEQ ID NO:2231 | −2.4 | −12.1 | 43.5 | −9.7 | 0 | −2.2 |
| 345 | AAATCCATATCTTGTTGCTT | SEQ ID NO:2232 | −2.3 | −20.9 | 62.8 | −18.6 | 0 | −3.6 |
| 368 | GGTGTACATCAAATTCTATA | SEQ ID NO:2233 | −2.3 | −18.7 | 58.6 | −16.4 | 0 | −7.2 |
| 730 | AATCAACAGAGGGCTACCTC | SEQ ID NO:2234 | −2.3 | −23.5 | 68 | −18.4 | −2.8 | −7.2 |
| 1110 | ACAGACTCTGGCTGCTCAAA | SEQ ID NO:2235 | −2.3 | −24.2 | 69.9 | −21 | −0.7 | −6.8 |
| 1185 | TTTATGTGATCCTTCAAACC | SEQ ID NO:2236 | −2.3 | −21 | 62.3 | −18 | −0.5 | −5.5 |
| 1264 | AACTTGACGTGTTGCTACAC | SEQ ID NO:2237 | −2.3 | −22.1 | 64.8 | −18.1 | −1.7 | −5.2 |
| 1392 | AAAGTATCTGCTGTCTCACC | SEQ ID NO:2238 | −2.3 | −23.3 | 69.3 | −21 | 0 | −3.6 |
| 1741 | GCCTCGTCCCATTATCAGAA | SEQ ID NO:2239 | −2.3 | −27 | 74.2 | −24.7 | 0 | −3 |
| 1761 | AGACAAGTAGCATAATGATA | SEQ ID NO:2240 | −2.3 | −17.5 | 55.3 | −15.2 | 0 | −4.1 |
| 2060 | AAGGGATCACGCTGAGAATG | SEQ ID NO:2241 | −2.3 | −21.6 | 62.5 | −18.8 | −0.1 | −5.3 |
| 2090 | GCACAGCAAGGTGGAAAGCC | SEQ ID NO:2242 | −2.3 | −25.8 | 71.6 | −22.6 | −0.7 | −5.1 |
| 2274 | ATATATAAATAAGGATTTAC | SEQ ID NO:2243 | −2.3 | −12.6 | 44.9 | −9.4 | −0.8 | −5.4 |
| 2617 | CACATCTTCTCTTAAAACTT | SEQ ID NO:2244 | −2.3 | −18.5 | 57.6 | −16.2 | 0 | −2.3 |
| 2758 | TTCCACCTACAGATAATAGA | SEQ ID NO:2245 | −2.3 | −20.8 | 61.8 | −18.5 | 0 | −2.4 |
| 199 | GTACTCCAGTCTCTGAAGGC | SEQ ID NO:2246 | −2.2 | −25.8 | 76.5 | −23 | −0.3 | −4.4 |
| 223 | CACACCAGCAGAATCATATC | SEQ ID NO:2247 | −2.2 | −22.1 | 64.7 | −19.9 | 0 | −4.1 |
| 579 | ATATACTTAACGAGCTTGGC | SEQ ID NO:2248 | −2.2 | −21 | 62.3 | −18.8 | 0 | −6.5 |
| 589 | ATTGTCATACATATACTTAA | SEQ ID NO:2249 | −2.2 | −16.6 | 53.9 | −14.4 | 0 | −2.9 |
| 929 | GAAAGATGACGCGATTGGTG | SEQ ID NO:2250 | −2.2 | −21.1 | 60.5 | −18.4 | 0 | 7.9 |
| 948 | GCAACATCATCATCTTCCAG | SEQ ID NO:2251 | −2.2 | −23.4 | 68.5 | −21.2 | 0 | −3.4 |
| 1418 | TCTCCTTACAGTAACGAAGA | SEQ ID NO:2252 | −2.2 | −21 | 62.2 | −18.8 | 0 | −4.5 |
| 2284 | ATTATAACTGATATATAAAT | SEQ ID NO:2253 | −2.2 | −12.2 | 44 | −9.4 | −0.3 | −4.4 |
| 2292 | GTGGAATAATTATAACTGAT | SEQ ID NO:2254 | −2.2 | −15.8 | 51.3 | −13.6 | 0 | −5.7 |
| 2326 | TGTAAGAGGTAACTTCACAA | SEQ ID NO:2255 | −2.2 | −18.7 | 58 | −15.2 | −1.2 | −5.9 |
| 2373 | CAATATAGATTCCATTATTC | SEQ ID NO:2256 | −2.2 | −17.5 | 55.5 | −15.3 | 0 | −2.7 |
| 2792 | ATGCACTACTGTAATATTTC | SEQ ID NO:2257 | −2.2 | −18.9 | 59.2 | −16.7 | 0 | −6.8 |
| 2833 | CTATAAAATTGTGCAAATAT | SEQ ID NO:2258 | −2.2 | −14.3 | 47.8 | −12.1 | 0 | −6.1 |
| 58 | GGATCGGGGGTGCACACACG | SEQ ID NO:2259 | −2.1 | −28.3 | 75.8 | −23.8 | −2.4 | −9.8 |
| 226 | TCCCACACCAGCAGAATCAT | SEQ ID NO:2260 | −2.1 | −26.4 | 72.4 | −24.3 | 0 | −4.1 |
| 752 | GTTTATGTTCACTCCGTACA | SEQ ID NO:2261 | −2.1 | −23.6 | 69.7 | −21.5 | 0 | −4.8 |
| 774 | ATAGGAATGTGATCAGTAGA | SEQ ID NO:2262 | −2.1 | −19.2 | 60.2 | −17.1 | 0 | −7.4 |
| 845 | AAAGGCAGGTTGTGCTGTCC | SEQ ID NO:2263 | −2.1 | −26.3 | 75.7 | −22 | −2.2 | −6.5 |
| 1344 | TCTCGAAAGACTGGTGTGTT | SEQ ID NO:2264 | −2.1 | −22.3 | 66.1 | −19.6 | −0.3 | −5.2 |
| 1547 | ACTGGCTGGTATAAGCCTTT | SEQ ID NO:2265 | −2.1 | −25 | 72 | −19.7 | −3.2 | 9.5 |
| 1574 | TAAGGGCAAACATCACAAGG | SEQ ID NO:2266 | −2.1 | −19.9 | 58.8 | −17.8 | 0 | −3.2 |
| 1654 | AATCAAATCAGGCAGCCGTT | SEQ ID NO:2267 | −2.1 | −23.7 | 66.6 | −20.8 | −0.3 | −9 |
| 2371 | ATATAGATTCCATTATTCAA | SEQ ID NO:2268 | −2.1 | −17.5 | 55.5 | −15.4 | 0 | −2.4 |
| 2652 | TTAAAAACAAAACAGPAACA | SEQ ID NO:2269 | −2.1 | −10.8 | 40.8 | −8.7 | 0 | −2 |
| 2890 | TTCAAATTTAAAATCATATT | SEQ ID NO:2270 | −2.1 | −12.5 | 44.5 | −10.4 | 0 | −5 |
| 113 | TACCACACATGATGCCGGAG | SEQ ID NO:2271 | −2 | −25.4 | 69.2 | −22.9 | −0.1 | −6.7 |
| 1186 | CTTTATGTGATCCTTCAAAC | SEQ ID NO:2272 | −2 | −19.9 | 60.5 | −17.2 | 0.5 | −5.5 |
| 1208 | AACGCCGGCATCTCTGGATC | SEQ ID NO:2273 | −2 | −27.4 | 74.1 | −23.8 | −0.9 | −11.3 |
| 1284 | AACTCAGTCAGCTCCTCAAG | SEQ ID NO:2274 | −2 | −24.2 | 71.4 | −22.2 | 0 | −4.4 |
| 1514 | CAATCTCAGGACCAGCATTA | SEQ ID NO:2275 | −2 | −23.4 | 67.8 | −21.4 | 0 | −4.1 |
| 1570 | GGCAAACATCACAAGGGATA | SEQ ID NO:2276 | −2 | −21.2 | 61.7 | −19.2 | 0 | −4 |
| 2164 | TTGTATAGATATTCCTCACT | SEQ ID NO:2277 | −2 | −20.6 | 63.6 | −18.6 | 0 | −2.8 |
| 2602 | AACTTGGCAAACCCTTCCCT | SEQ ID NO:2278 | −2 | −27.3 | 72.3 | −25.3 | 0.2 | −4 |
| 2796 | ACCAATGCACTACTGTAATA | SEQ ID NO:2279 | −2 | −20.5 | 60.7 | −18.5 | 0 | −5 |
| 2984 | AAAAATAAAAGACTACAGAT | SEQ ID NO:2280 | −2 | −11.7 | 42.6 | −9.7 | 0 | −2.2 |
| 3033 | GTTGTGATTTTAAAGAACAA | SEQ ID NO:2281 | −2 | −15.8 | 51.4 | −13.1 | −0.5 | −7 |
| 57 | GATCGGGGGTGCACACACGA | SEQ ID NO:2282 | −1.9 | −27.7 | 74.6 | −23.4 | −2.4 | −11 |
| 65 | GCTGGCGGGATCGGGGGTGC | SEQ ID NO:2283 | −1.9 | −32.5 | 86.1 | −30.6 | 0 | −5.7 |
| 112 | ACCACACATGATGCCGGAGA | SEQ ID NO:2284 | −1.9 | −26.3 | 70.9 | −23.9 | −0.1 | −6.7 |
| 271 | TTTGCAGGCATTGGCTTCCC | SEQ ID NO:2285 | −1.9 | −28.9 | 80.3 | −25.5 | −1.3 | −9.8 |
| 777 | AGTATAGGAATGTGATCAGT | SEQ ID NO:2286 | −1.9 | −19.8 | 62.1 | −17.9 | 0 | −7.4 |
| 997 | TGCAGTTCGTTTAATTCGAT | SEQ ID NO:2287 | −1.9 | −21.3 | 63.1 | −18.5 | −0.7 | −6.3 |
| 1029 | AGTGTTTGCACAGCTCGTCC | SEQ ID NO:2288 | −1.9 | −27.5 | 79.4 | −22.9 | −2.7 | −9.1 |
| 1620 | ATCTCTTTGCGTCTTTCTTG | SEQ ID NO:2289 | −1.9 | −23.5 | 71.1 | −21.6 | 0 | −4 |
| 1682 | TTTCGTCATCCATGCTCAGT | SEQ ID NO:2290 | −1.9 | −25.8 | 75.1 | −23.9 | 0 | −4.2 |
| 1887 | CTCATGATGATCATGATCAC | SEQ ID NO:2291 | −1.9 | −20.2 | 61.8 | −14.7 | −3.5 | −14.2 |
| 1922 | GAAGAGCATTCTGACACTTG | SEQ ID NO:2292 | −1.9 | −21.1 | 63.5 | −18.5 | −0.4 | −4.4 |
| 2657 | TTGATTTAAAAACAAAACAG | SEQ ID NO:2293 | −1.9 | −11.5 | 42.3 | −9.6 | 0 | −6.4 |
| 2749 | CAGATAATAGACAACAAGTC | SEQ ID NO:2294 | −1.9 | −16.6 | 53.2 | −13.6 | −1 | −4.4 |
| 2802 | AGACCCACCAATGCACTACT | SEQ ID NO:2295 | −1.9 | −26.1 | 71.1 | −24.2 | 0 | −5.5 |
| 583 | ATACATATACTTAACGAGCT | SEQ ID NO:2296 | −1.8 | −18.5 | 56.8 | −16.7 | 0 | −5 |
| 1108 | AGACTCTGGCTGCTCAAATA | SEQ ID NO:2297 | −1.8 | −23 | 67.6 | −21.2 | 0 | −6.1 |
| 1684 | AATTTCGTCATCCATGCTCA | SEQ ID NO:2298 | −1.8 | −23.9 | 68.9 | −22.1 | 0 | −4.2 |
| 1688 | TCTGAATTTCGTCATCCATG | SEQ ID NO:2299 | −1.8 | −22 | 64.8 | −20.2 | 0 | −5 |
| 1925 | GCTGAAGAGCATTCTGACAC | SEQ ID NO:2300 | −1.8 | −22.8 | 67.4 | −19.4 | −1.6 | −5.8 |
| 1954 | CACAGGCCGCCCCTGCCGAG | SEQ ID NO:2301 | −1.8 | −35.3 | 85.6 | −30.7 | −2.8 | −9 |
| 2083 | AAGGTGGAAAGCCAGCAACT | SEQ ID NO:2302 | −1.8 | −23.5 | 66.2 | −20.2 | −1.4 | −6.7 |
| 2104 | ATCATAGCCTCTCAGCACAG | SEQ ID NO:2303 | −1.8 | −25.3 | 74.1 | −22.6 | −0.7 | 4.1 |
| 2394 | GAATCTTTCTGATACAGATT | SEQ ID NO:2304 | −1.8 | −18.6 | 58.5 | −15.5 | −1.2 | −7.6 |
| 2686 | TAAAATTTTTCAGTTTTAAG | SEQ ID NO:2305 | −1.8 | −13.6 | 47.3 | −11.3 | −0.1 | −6.7 |
| 1116 | TTCACGACAGACTCTGGCTG | SEQ ID NO:2306 | −1.7 | −24.6 | 70.7 | −22 | −0.7 | 6.8 |
| 1260 | TAACGTGTTGCTACACCAGC | SEQ ID NO:2307 | −1.7 | −26.1 | 73.4 | −22.3 | −2.1 | −5.6 |
| 1615 | TTTGCGTCTTTCTTGCATGG | SEQ ID NO:2308 | −1.7 | −24.6 | 71.8 | −21.9 | −0.9 | −5.1 |
| 2738 | CAACAAGTCTGAGAAACTAA | SEQ ID NO:2309 | −1.7 | −16.6 | 52.5 | −14.9 | 0 | −3 |
| 3034 | TGTTGTGATTTTAAAGAACA | SEQ ID NO:2310 | −1.7 | −16.5 | 53.1 | −14.8 | 0 | −4.9 |
| 56 | ATCGGGGGTGCACACACGAG | SEQ ID NO:2311 | −1.6 | −27.1 | 73.7 | −23.1 | −2.4 | −11.3 |
| 294 | CCTTTCTTCTTAATAAGCTG | SEQ ID NO:2312 | −1.6 | −20.6 | 62.4 | −19 | 0 | −5.1 |
| 844 | AAGGCAGGTTGTGCTGTCCA | SEQ ID NO:2313 | −1.6 | −27.7 | 79.4 | −23.5 | −2.6 | −7.1 |
| 1220 | CAATAAGAATCAAACGCCGG | SEQ ID NO:2315 | −1.6 | −19.4 | 55.5 | −17.8 | 0 | −6.2 |
| 1221 | GCAATAAGAATCAAACGCCG | SEQ ID NO:2315 | −1.6 | −20 | 56.7 | −18.4 | 0 | −3.4 |
| 1462 | GGAACTGCCAACTGTGTTTG | SEQ ID NO:2316 | −1.6 | −23.7 | 67.9 | −21.6 | −0.2 | −3.7 |
| 2107 | AACATCATAGCCTCTCAGCA | SEQ ID NO:2317 | −1.6 | −24.6 | 71.3 | −22.1 | −0.7 | −4.1 |
| 2142 | ACAGTCACAGATTTGGCAAG | SEQ ID NO:2318 | −1.6 | −21.9 | 65.5 | −20.3 | 0 | −4.1 |
| 2370 | TATAGATTCCATTATTCAAA | SEQ ID NO:2319 | −1.6 | −16.8 | 53.7 | −15.2 | 0 | −2.6 |
| 2395 | AGAATCTTTCTGATACAGAT | SEQ ID NO:2320 | −1.6 | −18.5 | 58.4 | −15.6 | −1.2 | −7.3 |
| 2452 | TTGAAGTGGAGGGTCCAGAA | SEQ ID NO:2321 | −1.6 | −23.6 | 68.7 | −20.1 | −1.9 | −6.2 |
| 2462 | TCTTCTCAGATTGAAGTGGA | SEQ ID NO:2322 | −1.6 | −21.4 | 65.8 | −18.5 | −1.2 | −5.1 |
| 2492 | AAACAAGTACCAATTTTTAG | SEQ ID NO:2323 | −1.6 | −16 | 51.4 | −14.4 | 0 | −4.4 |
| 2610 | TCTCTTAAAACTTGGCAAAC | SEQ ID NO:2324 | −1.6 | −18 | 55.5 | −16.4 | 0 | −4 |
| 2682 | ATTTTTCAGTTTTAAGTTTT | SEQ ID NO:2325 | −1.6 | −17.5 | 57.4 | −15.9 | 0 | −2.6 |
| 2688 | AATAAAATTTTTCAGTTTTA | SEQ ID NO:2326 | −1.6 | −13.6 | 47.2 | −11.3 | −0.4 | −6.7 |
| 2829 | AAAATTGTGCAAATATGTTA | SEQ ID NO:2327 | −1.6 | −15 | 49.3 | −13.4 | 0 | −6.1 |
| 2910 | CAACATGTACACATCCCATC | SEQ ID NO:2328 | −1.6 | −23.1 | 66.1 | −21.5 | 0 | −7 |
| 698 | CTGCTTGCCCGGGAAAATGA | SEQ ID NO:2329 | −1.5 | −25.8 | 68.5 | −23.1 | 0 | −10.3 |
| 904 | TATGACAGCACTTGCATCAG | SEQ ID NO:2330 | −1.5 | −22.5 | 66.8 | −20.1 | −0.7 | −7.8 |
| 1176 | TCCTTCAAACCACCCAAATT | SEQ ID NO:2331 | −1.5 | −23.6 | 64.4 | −22.1 | 0 | −2.9 |
| 1713 | TGATGATAAAGTTCTGTTGC | SEQ ID NO:2332 | −1.5 | −19.2 | 59.8 | −17.7 | 0 | −2.6 |
| 2079 | TGGAAAGCCAGCAACTGTAA | SEQ ID NO:2333 | −1.5 | −22 | 62.9 | −19.4 | −1 | −6.1 |
| 2169 | ACATTTTGTATAGATATTCC | SEQ ID NO:2334 | −1.5 | −18.6 | 58.7 | −17.1 | 0 | −2.8 |
| 2328 | AATGTAAGAGGTAACTTCAC | SEQ ID NO:2335 | −1.5 | −18 | 56.8 | −15.2 | −1.2 | −5.7 |
| 2429 | CAACACCCAGCATTCTTTAA | SEQ ID NO:2336 | −1.5 | −22.9 | 65.1 | −21.4 | 0 | −4.1 |
| 2635 | ACAAATTTCAAAATAAATCA | SEQ ID NO:2337 | −1.5 | −12.1 | 43.4 | −10.6 | 0 | −4.5 |
| 2687 | ATAAAATTTTTCAGTTTTAA | SEQ ID NO:2338 | −1.5 | −13.6 | 47.2 | −11.3 | −0.6 | −6.7 |
| 700 | AACTGCTTGCCCGGGAAAAT | SEQ ID NO:2339 | −1.4 | −24.7 | 66 | −22.1 | 0 | −10.3 |
| 1224 | CAAGCAATAAGAATCAAACG | SEQ ID NO:2340 | −1.4 | −15.4 | 49 | −14 | 0 | −4.1 |
| 1428 | AAAGCTCCTCTCTCCTTACA | SEQ ID NO:2341 | −1.4 | −25.2 | 72.6 | −23.8 | 0 | −5 |
| 2493 | GAAACAAGTACCAATTTTTA | SEQ ID NO:2342 | −1.4 | −16.6 | 52.4 | −15.2 | 0 | −4.4 |
| 2544 | GATACTCCAATTAAATGCAC | SEQ ID NO:2343 | −1.4 | −18.9 | 57.1 | −17.5 | 0 | −5.5 |
| 349 | ATCCAAATCCATATCTTGTT | SEQ ID NO:2344 | −1.3 | −21.2 | 62.8 | −19.9 | 0 | −2.6 |
| 759 | GTAGAAAGTTTATGTTCACT | SEQ ID NO:2345 | −1.3 | −18.7 | 59.4 | −16.7 | −0.5 | −4.6 |
| 773 | TAGGAATGTGATCAGTAGAA | SEQ ID NO:2346 | −1.3 | −18.5 | 58.1 | −17.2 | 0 | −7.4 |
| 1268 | CAAGAACTTGACGTGTTGCT | SEQ ID NO:2347 | −1.3 | −21.9 | 63.7 | −20.6 | 0 | −6.5 |
| 1461 | GAACTGCCAACTGTGTTTGT | SEQ ID NO:2348 | −1.3 | −23.7 | 68.6 | −22.4 | 0 | −3.5 |
| 1703 | GTTCTGTTGCTAGTTTCTGA | SEQ ID NO:2349 | −1.3 | −23.6 | 73.4 | −22.3 | 0 | −4.1 |
| 1945 | CCCCTGCCGAGCAACCACTT | SEQ ID NO:2350 | −1.3 | −32 | 79.9 | −29.8 | −0.7 | −7.1 |
| 2601 | ACTTGGCAAACCCTTCCCTA | SEQ ID NO:2351 | −1.3 | −27.7 | 73.9 | −25.7 | −0.5 | −3.2 |
| 2629 | TTCAAAATAAATCACATCTT | SEQ ID NO:2352 | −1.3 | −14.8 | 49 | −13.5 | 0 | −1.2 |
| 2978 | AAAAGACTACAGATACAAGG | SEQ ID NO:2353 | −1.3 | −15.9 | 51.1 | −14.6 | 0 | −2.2 |
| 2985 | AAAAAATAAAAGACTACAGA | SEQ ID NO:2354 | −1.3 | −11 | 41.3 | −9.7 | 0 | −2.2 |
| 2996 | AGCAGTCATTTAAAAAATAA | SEQ ID NO:2355 | −1.3 | −14.2 | 47.7 | −12.9 | 0 | −5 |
| 3032 | TTGTGATTTTAAAGAACAAG | SEQ ID NO:2356 | −1.3 | −14.6 | 48.8 | −12.8 | −0.2 | −6.4 |
| 3038 | TCTGTGTTGTGATTTTAAAG | SEQ ID NO:2357 | −1.3 | −18.2 | 58 | −16.9 | 0 | −4.6 |
| 741 | CTCCGTACACCAATCAACAG | SEQ ID NO:2358 | −1.2 | −23.4 | 65.3 | −22.2 | 0 | −4.8 |
| 928 | AAAGATGACGCGATTGGTGT | SEQ ID NO:2359 | −1.2 | −21.7 | 62.1 | −19.8 | −0.5 | −7.9 |
| 951 | GCTGCAACATCATCATCTTC | SEQ ID NO:2360 | −1.2 | −23.4 | 69.4 | −22.2 | 0 | −5.8 |
| 982 | TCGATGGATAGAAAGACGTC | SEQ ID NO:2361 | −1.2 | −19.7 | 58.7 | −18 | 0 | −8.2 |
| 1024 | TTGCACAGCTCGTCCGGGGT | SEQ ID NO:2362 | −1.2 | −30.6 | 82.6 | −28.8 | −0.3 | −6.9 |
| 1179 | TGATCCTTCAAACCACCCAA | SEQ ID NO:2363 | −1.2 | −24.8 | 67.1 | −23.1 | −0.1 | −4.3 |
| 2047 | TGCAAGCAGTCCACTGAGTG | SEQ ID NO:2364 | −1.2 | −25.5 | 73.5 | 23.1 | −1.1 | 6.9 |
| 2396 | TAGAATCTTTCTGATACAGA | SEQ ID NO:2365 | −1.2 | −18.2 | 57.8 | −15.9 | −1 | −6.1 |
| 2605 | TAAAACTTGGCAAACCCTTC | SEQ ID NO:2366 | −1.2 | −20.7 | 59.6 | −18.8 | −0.5 | −4 |
| 2683 | AATTTTTCAGTTTTAAGTTT | SEQ ID NO:2367 | −1.2 | −16.7 | 55 | −15.5 | 0 | −2.6 |
| 2748 | AGATAATAGACAACAAGTCT | SEQ ID NO:2368 | −1.2 | −16.8 | 53.8 | −13.8 | −1.8 | −5.7 |
| 3005 | ATGTCATTCAGCAGTCATTT | SEQ ID NO:2369 | −1.2 | −22.5 | 69.3 | −21.3 | 0 | −4.1 |
| 55 | TCGGGGGTGCACACACGAGC | SEQ ID NO:2370 | −1.1 | −28.9 | 77.8 | −25.4 | −2.4 | −10.6 |
| 748 | ATGTTCACTCCGTACACCAA | SEQ ID NO:2371 | −1.1 | −24.7 | 69.3 | −23.6 | 0 | −4.8 |
| 1400 | GACCCATCAAAGTATCTGCT | SEQ ID NO:2372 | −1.1 | −24.1 | 68.8 | −23 | 0 | −3.6 |
| 1463 | TGGAACTGCCAACTGTGTTT | SEQ ID NO:2373 | −1.1 | −23.7 | 67.9 | −21.6 | −0.9 | −5.4 |
| 1610 | GTCTTTCTTGCATGGAGATC | SEQ ID NO:2374 | −1.1 | −23.4 | 71.5 | −22.3 | 0 | −5.1 |
| 2057 | GGATCACGCTGAGAATGCCC | SEQ ID NO:2375 | −1.1 | −26.9 | 72.8 | −25.3 | −0.1 | −5.3 |
| 2369 | ATAGATTCCATTATTCAAAG | SEQ ID NO:2376 | −1.1 | −17.1 | 54.4 | −16 | 0 | −2.6 |
| 2440 | GTCCAGAAATGCAACACCCA | SEQ ID NO:2377 | −1.1 | −25.1 | 68.2 | −23.3 | −0.4 | −5.6 |
| 2494 | TGAAACAAGTACCAATTTTT | SEQ ID NO:2378 | −1.1 | −16.9 | 52.9 | −15.8 | 0 | −4.4 |
| 2737 | AACAAGTCTGAGAAACTAAG | SEQ ID NO:2379 | −1.1 | −15.9 | 51.4 | −14.8 | 0 | −3 |
| 2834 | GCTATAAAATTGTGCAAATA | SEQ ID NO:2380 | −1.1 | −16.1 | 51.3 | −15 | 0 | −6.1 |
| 198 | TACTCCAGTCTCTGAAGGCC | SEQ ID NO:2381 | −1 | −26.6 | 76.6 | −25.1 | −0.1 | −6.3 |
| 903 | ATGACAGCACTTGCATCAGA | SEQ ID NO:2382 | −1 | −23.4 | 68.7 | −21.5 | −0.7 | −7.8 |
| 927 | AAGATGACGCGATTGGTGTG | SEQ ID NO:2383 | −1 | −22.4 | 64 | −20.5 | −0.7 | −7.9 |
| 1211 | TCAAACGCCGGCATCTCTGG | SEQ ID NO:2384 | −1 | −26.8 | 71.7 | −24.1 | −0.5 | −11.6 |
| 1628 | CAAGCATGATCTCTTTGCGT | SEQ ID NO:2385 | −1 | −23.7 | 68.6 | −21 | −1.7 | −6.4 |
| 1837 | GCCATGTTTCAATTCACCAG | SEQ ID NO:2386 | −1 | −24.4 | 69.8 | −23.4 | 0 | −4.3 |
| 2028 | TCCACTGAGTGGGGCACCTT | SEQ ID NO:2387 | −1 | −29.3 | 81 | −26 | −2.3 | −10.6 |
| 2055 | ATCACGCTGAGAATGCCCTG | SEQ ID NO:2388 | −1 | −26 | 70.9 | −24.5 | −0.1 | −5.1 |
| 2126 | CAAGATTCCGTGGGAAATCA | SEQ ID NO:2389 | −1 | −21.8 | 62.3 | −18.9 | −1.9 | −7.1 |
| 2321 | GAGGTAACTTCACAAAAATC | SEQ ID NO:2390 | −1 | −16.8 | 53.2 | −14.5 | −1.2 | −4.4 |
| 2412 | TAAAGAAAATAATAGCTAGA | SEQ ID NO:2391 | −1 | −12.5 | 44.4 | −11.5 | 0 | −6.3 |
| 2751 | TACAGATAATAGACAACAAG | SEQ ID NO:2392 | −1 | −14.9 | 49.3 | −13.9 | 0 | −1.2 |
| 2757 | TCCACCTACAGATAATAGAC | SEQ ID NO:2393 | −1 | −20.9 | 62 | −19.9 | 0 | −2.3 |
| 2794 | CAATGCACTACTGTAATATT | SEQ ID NO:2394 | −1 | −18.4 | 56.8 | −17.4 | 0 | 5.5 |
| 114 | ATACCACACATGATGCCGGA | SEQ ID NO:2395 | 0.9 | −25.4 | 68.9 | −24 | −0.1 | −6.7 |
| 233 | CATCAAATCCCACACCAGCA | SEQ ID NO:2396 | −0.9 | −25.8 | 69.8 | −24.9 | 0 | −4.1 |
| 288 | TTCTTAATAAGCTGGGTTTT | SEQ ID NO:2397 | −0.9 | −20.1 | 61.9 | −19.2 | 0 | −5.1 |
| 523 | GCCTTTGCTTTCCAAAAACT | SEQ ID NO:2398 | −0.9 | −23.2 | 65.2 | −21.2 | −1 | −5.4 |
| 910 | GTGTTCTATGACAGCACTTG | SEQ ID NO:2399 | −0.9 | −22.7 | 68.7 | −21.1 | −0.5 | −5.3 |
| 1248 | ACACCAGCATGGTAACTTGT | SEQ ID NO:2400 | −0.9 | −24.1 | 69.4 | −20.5 | −2.7 | −8.2 |
| 1625 | GCATGATCTCTTTGCGTCTT | SEQ ID NO:2401 | −0.9 | −25.1 | 73.6 | −23.2 | −0.9 | −5.7 |
| 1846 | AGCCAGAGGGCCATGTTTCA | SEQ ID NO:2402 | −0.9 | −28.5 | 80 | −24.9 | −2.7 | −9.5 |
| 2428 | AACACCCAGCATTCTTTAAA | SEQ ID NO:2403 | −0.9 | −21.5 | 62 | −20.6 | 0 | −4.1 |
| 2638 | GAAACAAATTTCAAAATAAA | SEQ ID NO:2404 | −0.9 | −10.2 | 39.9 | −7.7 | −1.6 | −5.6 |
| 2735 | CAAGTCTGAGAAACTAAGGC | SEQ ID NO:2405 | −0.9 | −19.4 | 59 | −18.5 | 0 | −3 |
| 2750 | ACAGATAATAGACAACAAGT | SEQ ID NO:2406 | −0.9 | −16.4 | 52.5 | −15.5 | 0 | −2.9 |
| 46 | CACACACGAGCTTCGGTGGG | SEQ ID NO:2407 | −0.8 | −26.9 | 73.5 | −22.9 | −3.2 | −10.9 |
| 74 | GGGCGAGTGGCTGGCGGGAT | SEQ ID NO:2408 | −0.8 | −31.5 | 83.4 | −29 | −1.7 | −6.3 |
| 227 | ATCCCACACCAGCAGAATCA | SEQ ID NO:2409 | −0.8 | −26.4 | 72.4 | −25.6 | 0 | −4.1 |
| 949 | TGCAACATCATCATCTTCCA | SEQ ID NO:2410 | −0.8 | −23.4 | 68.1 | −22.6 | 0 | −4.7 |
| 1573 | AAGGGCAAACATCACAAGGG | SEQ ID NO:2411 | −0.8 | −21.4 | 61.6 | −20.6 | 0 | −4 |
| 1655 | TAATCAAATCAGGCAGCCGT | SEQ ID NO:2412 | −0.8 | −23.3 | 65.7 | −21.7 | −0.3 | −9 |
| 2409 | AGAAAATAATAGCTAGAATC | SEQ ID NO:2413 | −0.8 | −13.9 | 47.4 | −13.1 | 0 | −6.3 |
| 2463 | GTCTTCTCAGATTGAAGTGG | SEQ ID NO:2415 | −0.8 | −22 | 67.8 | −19.9 | −1.2 | −5.9 |
| 348 | TCCAAATCCATATCTTGTTG | SEQ ID NO:2415 | −0.7 | −21.2 | 62.8 | −20.5 | 0 | −2.7 |
| 510 | AAAAACTTTTTCAAGTCTTT | SEQ ID NO:2416 | −0.7 | −15.8 | 51.7 | −13.7 | −1.3 | −4.7 |
| 1114 | CACGACAGACTCTGGCTGCT | SEQ ID NO:2417 | −0.7 | −26.8 | 74.8 | −26.1 | 0.2 | −6.4 |
| 1273 | CTCCTCAAGAACTTGACGTG | SEQ ID NO:2418 | −0.7 | −22.5 | 64.7 | −20.8 | −0.8 | −8.9 |
| 1548 | AACTGGCTGGTATAAGCCTT | SEQ ID NO:2419 | −0.7 | −24.2 | 69.3 | −20.3 | −3.2 | −9.5 |
| 1552 | TACAAACTGGCTGGTATAAG | SEQ ID NO:2420 | −0.7 | −19.3 | 58.5 | −18.6 | 0 | −5 |
| 2081 | GGTGGAAAGCCAGCAACTGT | SEQ ID NO:2421 | −0.7 | −25.4 | 71 | −24.7 | 3.2 | −6.6 |
| 2098 | GCCTCTCAGCACAGCAAGGT | SEQ ID NO:2422 | −0.7 | −28.7 | 81.2 | −27.1 | −0.7 | −5.1 |
| 2390 | CTTTCTGATACAGATTCCAA | SEQ ID NO:2423 | −0.7 | −20.7 | 62.3 | −18.7 | −1.2 | −6.2 |
| 2812 | TTAAGGATTGAGACCCACCA | SEQ ID NO:2424 | −0.7 | −24 | 67.1 | −22.8 | −0.2 | −3.7 |
| 2891 | CTTCAAATTTAAAATCATAT | SEQ ID NO:2425 | −0.7 | −13.3 | 46 | −12.6 | 0 | −5 |
| 2909 | AACATGTACACATCCCATCT | SEQ ID NO:2426 | −0.7 | −23.3 | 66.8 | −22.6 | 0 | −7 |
| 3006 | TATGTCATTCAGCAGTCATT | SEQ ID NO:2427 | −0.7 | −22.1 | 68.2 | −21.4 | 0 | −4.1 |
| 229 | AAATCCCACACCAGCAGAAT | SEQ ID NO:2428 | −0.6 | −23.9 | 65.7 | −23.3 | 0 | −4.1 |
| 578 | TATACTTAACGAGCTTGGCA | SEQ ID NO:2429 | −0.6 | −21.7 | 63.5 | −20.2 | −0.7 | −6.5 |
| 758 | TAGAAAGTTTATGTTCACTC | SEQ ID NO:2430 | −0.6 | −17.9 | 57.6 | −16.6 | −0.5 | −4.6 |
| 939 | TCATCTTCCAGAAAGATGAC | SEQ ID NO:2431 | −0.6 | −20.2 | 61.2 | −15.1 | −4.5 | −10.5 |
| 2170 | TACATTTTGTATAGATATTC | SEQ ID NO:2432 | −0.6 | −16.3 | 54.1 | −15.1 | −0.3 | −3.4 |
| 2285 | AATTATAACTGATATATAAA | SEQ ID NO:2433 | −0.6 | −11.5 | 42.6 | −10.3 | −0.3 | −4.4 |
| 2320 | AGGTAACTTCACAAAAATCA | SEQ ID NO:2434 | −0.6 | −16.9 | 53.2 | −15.4 | −0.7 | −3.3 |
| 2393 | AATCTTTCTGATACAGATTC | SEQ ID NO:2435 | −0.6 | −18.4 | 58.6 | −16.5 | −1.2 | −7.2 |
| 2411 | AAAGAAAATAATAGCTAGAA | SEQ ID NO:2436 | −0.6 | −12.1 | 43.5 | −11.5 | 0 | −6.3 |
| 2414 | TTTAAAGAAAATAATAGCTA | SEQ ID NO:2437 | −0.6 | −12.1 | 43.7 | −11.5 | 0 | −6 |
| 2636 | AACAAATTTCAAAATAAATC | SEQ ID NO:2438 | −0.6 | −10.7 | 40.9 | −10.1 | 0 | −4.5 |
| 2900 | ACATCCCATCTTCAAATTTA | SEQ ID NO:2439 | −0.6 | −21 | 62 | −20.4 | 0 | −4.7 |
| 3039 | CTCTGTGTTGTGATTTTAAA | SEQ ID NO:2440 | −0.6 | −19.1 | 59.8 | −18.5 | 0 | −4.2 |
| 75 | GGGGCGAGTGGCTGGCGGGA | SEQ ID NO:2441 | −0.5 | −32.7 | 86 | −30.5 | −1.7 | −6.3 |
| 792 | TTGCCTGTTCTGTAGAGTAT | SEQ ID NO:2442 | −0.5 | −23.8 | 72.2 | −23.3 | 0 | −3.2 |
| 964 | TCCATCCACTACTGCTGCAA | SEQ ID NO:2443 | −0.5 | −26.6 | 73.8 | −26.1 | 0 | −7.3 |
| 983 | TTCGATGGATAGAAAGACGT | SEQ ID NO:2444 | −0.5 | −19.4 | 57.8 | −18.9 | 0 | −5.2 |
| 1225 | ACAAGCAATAAGAATCAAAC | SEQ ID NO:2445 | −0.5 | −14.8 | 48.5 | −14.3 | 0 | −4.1 |
| 1226 | CACAAGCAATAAGAATCAAA | SEQ ID NO:2446 | −0.5 | −15.3 | 49.2 | −14.8 | 0 | −3.3 |
| 2054 | TCACGCTGAGAATGCCCTGC | SEQ ID NO:2447 | −0.5 | −27.8 | 74.9 | −27.3 | 0 | −4.2 |
| 2275 | GATATATAAATAAGGATTTA | SEQ ID NO:2448 | −0.5 | −13 | 45.7 | −11.3 | −1.1 | −5.6 |
| 2413 | TTAAAGAAAATAATAGCTAG | SEQ ID NO:2449 | −0.5 | −12 | 43.5 | −11.5 | 0 | −6.3 |
| 2634 | CAAATTTCAAAATAAATCAC | SEQ ID NO:2450 | −0.5 | −12.1 | 43.4 | −11.6 | 0 | −4.5 |
| 2656 | TGATTTAAAAACAAAACAGA | SEQ ID NO:2451 | −0.5 | −12 | 43.1 | −11.5 | 0 | −5 |
| 2736 | ACAAGTCTGAGAAACTAAGG | SEQ ID NO:2452 | −0.5 | −17.8 | 55.6 | −17.3 | 0 | −3 |
| 2773 | CGCTTCCTAAATTTCTTCCA | SEQ ID NO:2453 | −0.5 | −23.9 | 67.5 | −23.4 | 0 | −4.9 |
| 111 | CCACACATGATGCCGGAGAC | SEQ ID NO:2454 | −0.4 | −26.3 | 70.9 | −25.9 | 0 | −6.7 |
| 995 | CAGTTCGTTTAATTCGATGG | SEQ ID NO:2455 | −0.4 | −20.7 | 61.6 | −19.4 | −0.7 | −6.3 |
| 1415 | CCTTACAGTAACGAAGACCC | SEQ ID NO:2456 | −0.4 | −23.5 | 65.2 | −23.1 | 0 | 4.7 |
| 1683 | ATTTCGTCATCCATGCTCAG | SEQ ID NO:2457 | −0.4 | −24.6 | 71.5 | −24.2 | 0 | −4.2 |
| 2084 | CAAGGTGGAAAGCCAGCAAC | SEQ ID NO:2458 | −0.4 | −23.3 | 65.5 | −21.5 | −1.3 | −6.7 |
| 2280 | TAACTGATATATAAATAAGG | SEQ ID NO:2459 | −0.4 | −12.6 | 44.7 | −12.2 | 0 | −4.2 |
| 2690 | CCAATAAAATTTTTCAGTTT | SEQ ID NO:2460 | −0.4 | −16.5 | 52.5 | −16.1 | 0 | −6.4 |
| 2739 | ACAACAAGTCTGAGAAACTA | SEQ ID NO:2461 | −0.4 | −17.5 | 54.7 | −17.1 | 0 | −3 |
| 2756 | CCACCTACAGATAATAGACA | SEQ ID NO:2462 | −0.4 | −21.2 | 61.8 | −20.8 | 0 | −2.4 |
| 3007 | ATATGTCATTCAGCAGTCAT | SEQ ID NO:2463 | −0.4 | −22 | 67.8 | −21.6 | 0 | −4.1 |
| 270 | TTGCAGGCATTGGCTTCCCA | SEQ ID NO:2464 | −0.3 | −29.5 | 81 | −27.7 | −1.3 | −9.8 |
| 286 | CTTAATAAGCTGGGTTTTGC | SEQ ID NO:2465 | −0.3 | −21.4 | 64.2 | −21.1 | 0 | −5.1 |
| 1685 | GAATTTCGTCATCCATGCTC | SEQ ID NO:2466 | −0.3 | −23.8 | 69.1 | −23.5 | 0 | −4.4 |
| 2651 | TAAAAACAAAACAGAAACAA | SEQ ID NO:2467 | −0.3 | −10 | 39.4 | −9.7 | 0 | 0 |
| 2793 | AATGCACTACTGTAATATTT | SEQ ID NO:2468 | −0.3 | −17.8 | 55.9 | −17.5 | 0 | −6.8 |
| 2803 | GAGACCCACCAATGCACTAC | SEQ ID NO:2469 | −0.3 | −25.8 | 70.5 | −25.5 | 0 | −5.5 |
| 365 | GTACATCAAATTCTATATCC | SEQ ID NO:2470 | −0.2 | −18.7 | 58.2 | −18.5 | 0 | −4.6 |
| 1111 | GACAGACTCTGGCTGCTCAA | SEQ ID NO:2471 | −0.2 | −25.5 | 73.6 | −24.4 | −0.7 | −6.8 |
| 1177 | ATCCTTCAAACCACCCAAAT | SEQ ID NO:2472 | −0.2 | −23.5 | 64.1 | −23.3 | 0 | −1 |
| 1277 | TCAGCTCCTCAAGAACTTGA | SEQ ID NO:2473 | −0.2 | −23.2 | 67.9 | −22.1 | −0.6 | −8.7 |
| 1416 | TCCTTACAGTAACGAAGACC | SEQ ID NO:2474 | −0.2 | −21.9 | 63.1 | −21.7 | 0 | −4.7 |
| 2082 | AGGTGGAAAGCCAGCAACTG | SEQ ID NO:2475 | −0.2 | −24.2 | 68.2 | −22.5 | −1.4 | −6.7 |
| 2100 | TAGCCTCTCAGCACAGCAAG | SEQ ID NO:2476 | −0.2 | −26 | 74.7 | −24.9 | −0.7 | −4.8 |
| 2630 | TTTCAAAATAAATCACATCT | SEQ ID NO:2477 | −0.2 | −14.8 | 49 | −14.6 | 0 | −1.7 |
| 2747 | GATAATAGACAACAAGTCTG | SEQ ID NO:2478 | −0.2 | −16.8 | 53.6 | −14.6 | −2 | −5.7 |
| 2899 | CATCCCATCTTCAAATTTAA | SEQ ID NO:2479 | −0.2 | −20.1 | 59.S | −19.9 | 0 | −4.7 |
| 525 | TAGCCTTTGCTTTCCAAAAA | SEQ ID NO:2480 | −0.1 | −21.8 | 62.6 | −20.3 | −1.3 | −5.9 |
| 678 | ACACTTTTAAACACAAGTGC | SEQ ID NO:2481 | −0.1 | −18.7 | 57.3 | −16.2 | −2.4 | −8.7 |
| 940 | ATCATCTTCCAGAAAGATGA | SEQ ID NO:2482 | −0.1 | −20 | 60.6 | −15.1 | −4.8 | −11.1 |
| 1210 | CAAACGCCGGCATCTCTGGA | SEQ ID NO:2483 | −0.1 | −27 | 71.4 | −25.3 | −0.9 | −11.1 |
| 1391 | AAGTATCTGCTGTCTCACCT | SEQ ID NO:2484 | −0.1 | −24.9 | 73.8 | −24.8 | 0 | −3.6 |
| 1963 | ACAAATTACCACAGGCCGCC | SEQ ID NO:2485 | −0.1 | −26.7 | 70.4 | −26.1 | 0 | −7.7 |
| 2029 | GTCCACTGAGTGGGGCACCT | SEQ ID NO:2486 | −0.1 | −30.4 | 84.3 | −28 | −2.3 | −10.6 |
| 2332 | GGAAAATGTAAGAGGTAACT | SEQ ID NO:2487 | −0.1 | −17 | 53.5 | −15.8 | −1 | −3.5 |
| 2691 | ACCAATAAAATTTTTCAGTT | SEQ ID NO:2488 | −0.1 | −16.6 | 52.7 | −16.5 | 0 | −6.7 |
| 2693 | CTACCAATAAAATTTTTCAG | SEQ ID NO:2489 | −0.1 | −15.9 | 51 | −15.8 | 0 | −6.7 |
| 2771 | CTTCCTAAATTTCTTCCACC | SEQ ID NO:2490 | −0.1 | −23.5 | 67.4 | −23.4 | 0 | −4.9 |
| 3031 | TGTGATTTTAAAGAACAAGA | SEQ ID NO:2491 | −0.1 | −15.1 | 49.8 | −15 | 0 | −4.6 |
| 287 | TCTTAATAAGCTGGGTTTTG | SEQ ID NO:2492 | 0 | −20 | 61.5 | −20 | 0 | −5.1 |
| 367 | GTGTACATCAAATTCTATAT | SEQ ID NO:2493 | 0 | −17.5 | 55.9 | 17.5 | 0 | −6.6 |
| 742 | ACTCCGTACACCAATCAACA | SEQ ID NO:2494 | 0 | −23.6 | 65.6 | −23.6 | 0 | −4.3 |
| 772 | AGGAATGTGATCAGTAGAAA | SEQ ID NO:2495 | 0 | −18.1 | 56.7 | −18.1 | 0 | −6.6 |
| 848 | GGAAAAGGCAGGTTGTGCTG | SEQ ID NO:2496 | 0 | −23.8 | 68.5 | −21.6 | −2.2 | −5.2 |
| 909 | TGTTCTATGACAGCACTTGC | SEQ ID NO:2497 | 0 | −23.3 | 69.7 | −23.3 | 0 | −5.7 |
| 1247 | CACCAGCATGGTAACTTGTT | SEQ ID NO:2498 | 0 | −24 | 69.2 | −21.3 | −2.7 | −9 |
| 1272 | TCCTCAAGAACTTGACGTGT | SEQ ID NO:2499 | 0 | −22.8 | 65.9 | −21.8 | −0.8 | −8.9 |
| 1962 | CAAATTACCACAGGCCGCCC | SEQ ID NO:2500 | 0 | −28.5 | 73 | −28 | 0 | −7.7 |
| 2418 | ATTCTTTAAAGAAAATAATA | SEQ ID NO:2501 | 0 | −11.1 | 41.8 | −9.1 | −0.9 | −12.2 |
| 2427 | ACACCCAGCATTCTTTAAAG | SEQ ID NO:2502 | 0 | −22.2 | 64.2 | −22.2 | 0 | −7.4 |
| 2433 | AATGCAACACCCAGCATTCT | SEQ ID NO:2503 | 0 | −24.8 | 68.7 | −22.2 | −2.6 | −7.6 |
| 2684 | AAATTTTTCAGTTTTAAGTT | SEQ ID NO:2504 | 0 | −15.9 | 52.7 | −15.9 | 0 | −4.3 |
| 2692 | TACCAATAAAATTTTTCAGT | SEQ ID NO:2505 | 0 | −16.2 | 51.9 | −16.2 | 0 | −6.7 |
| 2709 | AACTTAGATATAAATCCTAC | SEQ ID NO:2506 | 0 | −16 | 51.8 | −15.1 | −0.7 | −4.2 |
| 2995 | GCAGTCATTTAAAAAATAAA | SEQ ID NO:2507 | 0 | −13.5 | 46.1 | −12.9 | −0.3 | −5 |
| 524 | AGCCTTTGCTTTCCAAAAAC | SEQ ID NO:2508 | 0.1 | −22.3 | 63.6 | −21.2 | −1.1 | −5.9 |
| 1845 | GCCAGAGGGCCATGTTTCAA | SEQ ID NO:2509 | 0.1 | −27.8 | 77.1 | −26 | −1.9 | −9.5 |
| 2040 | CCCTGCAAGCAGTCCACTGA | SEQ ID NO:2510 | 0.1 | −29.2 | 79 | −28.4 | −0.5 | −9.3 |
| 2099 | AGCCTCTCAGCACAGCAAGG | SEQ ID NO:2511 | 0.1 | −27.5 | 77.9 | −26.7 | −0.7 | −4.9 |
| 2109 | TCAACATCATAGCCTCTCAG | SEQ ID NO:2512 | 0.1 | −23.2 | 68.6 | −23.3 | 0 | −3.2 |
| 2119 | CCGTGGGAAATCAACATCAT | SEQ ID NO:2513 | 0.1 | −22 | 62.2 | −21.6 | −0.2 | −4.2 |
| 2609 | CTCTTAAAACTTGGCAAACC | SEQ ID NO:2515 | 0.1 | −19.6 | 57.9 | −19.2 | −0.1 | −4 |
| 2699 | TAAATCCTACCAATAAAATT | SEQ ID NO:2515 | 0.1 | −15.2 | 48.9 | −15.3 | 0 | −2.9 |
| 2722 | CTAAGGCTAACCAAACTTAG | SEQ ID NO:2516 | 0.1 | −19.2 | 57.5 | −17.9 | −1.3 | −5.8 |
| 697 | TGCTTGCCCGGGAAAATGAA | SEQ ID NO:2517 | 0.2 | −24.2 | 64.9 | −23.2 | 0 | −10.3 |
| 1388 | TATCTGCTGTCTCACCTGAT | SEQ ID NO:2518 | 0.2 | −25 | 73.7 | −25.2 | 0 | −3 |
| 2036 | GCAAGCAGTCCACTGAGTGG | SEQ ID NO:2519 | 0.2 | −26.7 | 76.4 | −25 | −1.9 | −8.9 |
| 2163 | TGTATAGATATTCCTCACTC | SEQ ID NO:2520 | 0.2 | −20.9 | 64.8 | −21.1 | 0 | −2.8 |
| 2287 | ATAATTATAACTGATATATA | SEQ ID NO:2521 | 0.2 | −12.6 | 45 | 12.8 | 0 | 5.3 |
| 2645 | CAAAACAGAAACAAATTTCA | SEQ ID NO:2522 | 0.2 | −13.5 | 45.8 | −11.3 | −2.4 | −5.5 |
| 2813 | GTTAAGGATTGAGACCCACC | SEQ ID NO:2523 | 0.2 | −24.5 | 69.1 | −24.7 | 0.6 | −2.9 |
| 2992 | GTCATTTAAAAAATAAAAGA | SEQ ID NO:2524 | 0.2 | −10.9 | 41.3 | −10.3 | −0.6 | −5 |
| 42 | CACGAGCTTCGGTGGGCAAT | SEQ ID NO:2525 | 0.3 | −26.9 | 73 | −25.7 | −1.4 | −7.3 |
| 236 | CTCCATCAAATCCCACACCA | SEQ ID NO:2526 | 0.3 | −26.6 | 71.1 | −26.9 | 0 | −1.1 |
| 687 | GGAAAATGAACACTTTTAAA | SEQ ID NO:2527 | 0.3 | −14.2 | 47.3 | −14.5 | 0 | −4.4 |
| 688 | GGGAAAATGAACACTTTTAA | SEQ ID NO:2528 | 0.3 | −16.1 | 51.1 | −16.4 | 0 | −4.4 |
| 1112 | CGACAGACTCTGGCTGCTCA | SEQ ID NO:2529 | 0.3 | −27 | 75.9 | −26.4 | −0.8 | −6.8 |
| 1242 | GCATGGTAACTTGTTCCACA | SEQ ID NO:2530 | 0.3 | −24.4 | 70.5 | −23.1 | −1.5 | −7.2 |
| 1274 | GCTCCTCAAGAACTTGACGT | SEQ ID NO:2531 | 0.3 | −24.3 | 68.9 | −23.7 | −0.6 | −8.7 |
| 2041 | GCCCTGCAAGCAGTCCACTG | SEQ ID NO:2532 | 0.3 | −30.4 | 81.9 | −29.8 | −0.2 | −9.3 |
| 2286 | TAATTATAACTGATATATAA | SEQ ID NO:2533 | 0.3 | −11.9 | 43.5 | −11.7 | −0.1 | −4.4 |
| 2329 | AAATGTAAGAGGTAACTTCA | SEQ ID NO:2534 | 0.3 | −17.1 | 54.4 | −16.1 | −1.2 | −5.6 |
| 2700 | ATAAATCCTACCAATAAAAT | SEQ ID NO:2535 | 0.3 | −15.1 | 48.6 | −15.4 | 0 | −1.2 |
| 2768 | CCTAAATTTCTTCCACCTAC | SEQ ID NO:2536 | 0.3 | −22.9 | 65.6 | −23.2 | 0 | −4.9 |
| 289 | CTTCTTAATAAGCTGGGTTT | SEQ ID NO:2537 | 0.4 | −20.9 | 63.5 | −21.3 | 0 | −5.1 |
| 350 | TATCCAAATCCATATCTTGT | SEQ ID NO:2538 | 0.4 | −20.8 | 61.9 | −21.2 | 0 | −2.6 |
| 791 | TGCCTGTTCTGTAGAGTATA | SEQ ID NO:2539 | 0.4 | −23.4 | 71.2 | −23.8 | 0 | −3.2 |
| 793 | TTTGCCTGTTCTGTAGAGTA | SEQ ID NO:2540 | 0.4 | −23.9 | 72.7 | −24.3 | 0 | −3.2 |
| 843 | AGGCAGGTTGTGCTGTCCAC | SEQ ID NO:2541 | 0.4 | −28.6 | 82.9 | −26.4 | −2.6 | −7.1 |
| 1402 | AAGACCCATCAAAGTATCTG | SEQ ID NO:2542 | 0.4 | −20.7 | 61 | −20.4 | −0.4 | −3.3 |
| 2376 | TTCCAATATAGATTCCATTA | SEQ ID NO:2543 | 0.4 | −19.5 | 59.4 | −19.9 | 0 | −2.4 |
| 2377 | ATTCCAATATAGATTCCATT | SEQ ID NO:2544 | 0.4 | −19.8 | 59.9 | −20.2 | 0 | −2.7 |
| 2450 | GAAGTGGAGGGTCCAGAAAT | SEQ ID NO:2545 | 0.4 | −22.8 | 66.2 | −21.3 | −1.9 | −6.2 |
| 2465 | TTGTCTTCTCAGATTGAAGT | SEQ ID NO:2546 | 0.4 | −20.9 | 65.4 | −20 | −1.2 | −5.9 |
| 2616 | ACATCTTCTCTTAAAACTTG | SEQ ID NO:2547 | 0.4 | −17.8 | 56.3 | −18.2 | 0 | −2.3 |
| 2901 | CACATCCCATCTTCAAATTT | SEQ ID NO:2548 | 0.4 | −22 | 63.7 | −22.4 | 0 | −4.3 |
| 228 | AATCCCACACCAGCAGAATC | SEQ ID NO:2549 | 0.5 | −25 | 69.1 | −25.5 | 0 | −4.1 |
| 757 | AGAAAGTTTATGTTCACTCC | SEQ ID NO:2550 | 0.5 | −20.2 | 62.2 | −20 | −0.5 | −4.6 |
| 1484 | CACAATCTGTCTCCCGTGAT | SEQ ID NO:2551 | 0.5 | −25.7 | 71.8 | −26.2 | 0 | −3.9 |
| 1677 | TCATCCATGCTCAGTACTTC | SEQ ID NO:2552 | 0.5 | −24.5 | 73.3 | −25 | 0 | −5.7 |
| 1847 | AAGCCAGAGGGCCATGTTTC | SEQ ID NO:2553 | 0.5 | −27.1 | 76.3 | −24.9 | −2.7 | −9.5 |
| 2143 | TACAGTCACAGATTTGGCAA | SEQ ID NO:2554 | 0.5 | −21.6 | 64.7 | −22.1 | 0 | −4.1 |
| 2148 | CACTCTACAGTCACAGATTT | SEQ ID NO:2555 | 0.5 | −21.7 | 66.2 | −22.2 | 0 | −2.8 |
| 2374 | CCAATATAGATTCCATTATT | SEQ ID NO:2556 | 0.5 | −19.1 | 58 | −19.6 | 0 | −2.7 |
| 2466 | ATTGTCTTCTCAGATTGAAG | SEQ ID NO:2557 | 0.5 | −19.7 | 62 | −19.6 | −0.3 | −5.6 |
| 2795 | CCAATGCACTACTGTAATAT | SEQ ID NO:2558 | 0.5 | −20.3 | 60.2 | −20.8 | 0 | −5.5 |
| 3008 | AATATGTCATTCAGCAGTCA | SEQ ID NO:2559 | 0.5 | −21.3 | 65.4 | −21.8 | 0 | −4.1 |
| 911 | TGTGTTCTATGACAGCACTT | SEQ ID NO:2560 | 0.6 | −22.7 | 68.7 | −22 | −1.2 | −5.2 |
| 1613 | TGCGTCTTTCTTGCATGGAG | SEQ ID NO:2561 | 0.6 | −25 | 72.7 | −24.7 | −0.7 | −5.1 |
| 1626 | AGCATGATCTCTTTGCGTCT | SEQ ID NO:2562 | 0.6 | −25 | 73.5 | −23.9 | −1.7 | −6.4 |
| 1686 | TGAATTTCGTCATCCATGCT | SEQ ID NO:2563 | 0.6 | −23.4 | 67.4 | −24 | 0 | −5 |
| 1828 | CAATTCACCAGCAAGGATGC | SEQ ID NO:2564 | 0.6 | −23.5 | 66.8 | −22.3 | −1.8 | −6.1 |
| 1841 | GAGGGCCATGTTTCAATTCA | SEQ ID NO:2565 | 0.6 | −24.5 | 70.9 | −24.6 | 0 | −7.6 |
| 2144 | CTACAGTCACAGATTTGGCA | SEQ ID NO:2566 | 0.6 | −23.2 | 68.9 | −23.8 | 0 | −4 |
| 2997 | CAGCAGTCATTTAAAAAATA | SEQ ID NO:2567 | 0.6 | −15.6 | 50.5 | −16.2 | 0 | −5 |
| 1855 | ATCCACCAAAGCCAGAGGGC | SEQ ID NO:2568 | 0.7 | −27.9 | 75.1 | −26.3 | −2.3 | −6.2 |
| 1944 | CCCTGCCGAGCAACCACTTG | SEQ ID NO:2569 | 0.7 | −30 | 76.7 | −29.8 | −0.7 | −7.1 |
| 2032 | GCAGTCCACTGAGTGGGGCA | SEQ ID NO:2570 | 0.7 | −29.8 | 84.1 | −28.1 | −2.4 | −10.6 |
| 2118 | CGTGGGAAATCAACATCATA | SEQ ID NO:2571 | 0.7 | −19.7 | 58.2 | −19.9 | −0.2 | −2.6 |
| 2375 | TCCAATATAGATTCCATTAT | SEQ ID NO:2572 | 0.7 | −19.4 | 59 | −20.1 | 0 | −2.7 |
| 2633 | AAATTTCAAAATAAATCACA | SEQ ID NO:2573 | 0.7 | −12.1 | 43.4 | −12.8 | 0 | −4.3 |
| 2702 | ATATAAATCCTACCAATAAA | SEQ ID NO:2574 | 0.7 | −15.5 | 49.6 | −16.2 | 0 | −2.5 |
| 2898 | ATCCCATCTTCAAATTTAAA | SEQ ID NO:2575 | 0.7 | −18.7 | 56.5 | −19.4 | 0 | −4.7 |
| 3019 | GAACAAGATAAAATATGTCA | SEQ ID NO:2576 | 0.7 | −14.3 | 47.8 | −15 | 0 | −3.5 |
| 272 | TTTTGCAGGCATTGGCTTCC | SEQ ID NO:2577 | 0.8 | −27 | 77.1 | −26.3 | −1.3 | −9.8 |
| 354 | TCTATATCCAAATCCATATC | SEQ ID NO:2578 | 0.8 | −19.6 | 59.5 | −20.4 | 0 | −2.4 |
| 680 | GAACACTTTTAAACACAAGT | SEQ ID NO:2579 | 0.8 | −16.8 | 53 | −17.6 | 0 | −4.4 |
| 689 | CGGGAAAATGAACACTTTTA | SEQ ID NO:2580 | 0.8 | −17.6 | 53.5 | −18.4 | 0 | −4.4 |
| 842 | GGCAGGTTGTGCTGTCCACA | SEQ ID NO:2581 | 0.8 | −29.3 | 83.6 | −27.9 | −2.2 | −7.6 |
| 1436 | CCACAGTTAAAGCTCCTCTC | SEQ ID NO:2582 | 0.8 | −24.9 | 71.8 | −25.7 | 0 | −5 |
| 1473 | TCCCGTGATATGGAACTGCC | SEQ ID NO:2583 | 0.8 | −26.7 | 72.1 | −27 | −0.2 | −3.4 |
| 1569 | GCAAACATCACAAGGGATAC | SEQ ID NO:2584 | 0.8 | −20.2 | 59.8 | −21 | 0 | −3.5 |
| 1676 | CATCCATGCTCAGTACTTCC | SEQ ID NO:2585 | 0.8 | −26.1 | 75.3 | −26.9 | 0 | −5.7 |
| 1740 | CCTCGTCCCATTATCAGAAC | SEQ ID NO:2586 | 0.8 | −25.4 | 70.6 | −26.2 | 0 | −3 |
| 2380 | CAGATTCCAATATAGATTCC | SEQ ID NO:2587 | 0.8 | −20.3 | 61.1 | −21.1 | 0 | −2.7 |
| 2701 | TATAAATCCTACCAATAAAA | SEQ ID NO:2588 | 0.8 | −14.8 | 48.1 | −15.6 | 0 | −1.5 |
| 902 | TGAAGCACTTGCATCAGAA | SEQ ID NO:2589 | 0.9 | −22.7 | 66.4 | −23 | −0.3 | −7 |
| 1255 | TGTTGCTACACCAGCATGGT | SEQ ID NO:2590 | 0.9 | −26.4 | 75.3 | −24.8 | −2.5 | −9.4 |
| 1276 | CAGCTCCTCAAGAACTTGAC | SEQ ID NO:2591 | 0.9 | −23 | 66.9 | −22.9 | −0.8 | −8.9 |
| 1384 | TGCTGTCTCACCTGATTGAC | SEQ ID NO:2592 | 0.9 | −24.9 | 72.8 | −25.8 | 0 | −4.3 |
| 1389 | GTATCTGCTGTCTCACCTGA | SEQ ID NO:2593 | 0.9 | −26.2 | 77.4 | −27.1 | 0 | −3.6 |
| 1464 | ATGGAACTGCCAACTGTGTT | SEQ ID NO:2594 | 0.9 | −23.6 | 67.6 | −23.1 | −1.3 | −5.4 |
| 1549 | AAACTGGCTGGTATAAGCCT | SEQ ID NO:2595 | 0.9 | −23.4 | 66.8 | −21.8 | −2.5 | −8.8 |
| 1849 | CAAAGCCAGAGGGCCATGTT | SEQ ID NO:2596 | 0.9 | −26.6 | 73 | −24.8 | −2.7 | −9.5 |
| 1921 | AAGAGCATTCTGACACTTGG | SEQ ID NO:2597 | 0.9 | −21.7 | 64.8 | −21.9 | −0.4 | −4.1 |
| 2127 | GCAAGATTCCGTGGGAAATC | SEQ ID NO:2598 | 0.9 | −22.9 | 65 | −22.3 | −1.4 | −6.5 |
| 2276 | TGATATATAAATAAGGATTT | SEQ ID NO:2599 | 0.9 | −13.3 | 46.2 | −13.6 | −0.3 | −5.4 |
| 2378 | GATTCCAATATAGATTCCAT | SEQ ID NO:2600 | 0.9 | −20.3 | 60.9 | −21.2 | 0 | −2.7 |
| 2449 | AAGTGGAGGGTCCAGAAATG | SEQ ID NO:2601 | 0.9 | −22.2 | 64.8 | −21.2 | −1.9 | −6.2 |
| 2685 | AAAATTTTTCAGTTTTAAGT | SEQ ID NO:2602 | 0.9 | −15.1 | 50.6 | −16 | 0 | −6.3 |
| 2819 | AAATATGTTAAGGATTGAGA | SEQ ID NO:2603 | 0.9 | −15.7 | 51.3 | −16.6 | 0 | −2.7 |
| 273 | GTTTTGCAGGCATTGGCTTC | SEQ ID NO:2604 | 1 | −26.2 | 77.1 | −25.7 | −1.3 | −9.8 |
| 364 | TACATCAAATTCTATATCCA | SEQ ID NO:2605 | 1 | −18.2 | 56.5 | −19.2 | 0 | −3.1 |
| 2415 | CTTTAAAGAAAATAATAGCT | SEQ ID NO:2606 | 1 | −13.3 | 45.9 | −14.3 | 0 | −7 |
| 2416 | TCTTTAAAGAAAATAATAGC | SEQ ID NO:2607 | 1 | −12.8 | 45.1 | −13 | 0 | −9.2 |
| 2746 | ATAATAGACAACAAGTCTGA | SEQ ID NO:2608 | 1 | −16.8 | 53.6 | −16.1 | −1.7 | −5.7 |
| 2814 | TGTTAAGGATTGAGACCCAC | SEQ ID NO:2609 | 1 | −22.5 | 65.4 | −23 | −0.2 | −3.4 |
| 3030 | GTGATTTTAAAGAACAAGAT | SEQ ID NO:2610 | 1 | −15.1 | 49.8 | −16.1 | 0 | −4.3 |
| 682 | ATGAACACTTTTAAACACAA | SEQ ID NO:2611 | 1.1 | −15.6 | 50.2 | −16.7 | 0 | −4.4 |
| 699 | ACTGCTTGCCCGGGAAAATG | SEQ ID NO:2612 | 1.1 | −25.4 | 67.8 | −25.3 | 0 | −10.3 |
| 1249 | TACACCAGCATGGTAACTTG | SEQ ID NO:2613 | 1.1 | −22.6 | 65.6 | −21 | −2.7 | −8.2 |
| 1345 | ATCTCGAAAGACTGGTGTGT | SEQ ID NO:2615 | 1.1 | −22.2 | 65.7 | −22.6 | −0.4 | −4.5 |
| 1474 | CTCCCGTGATATGGAACTGC | SEQ ID NO:2615 | 1.1 | −25.6 | 70.5 | −26.2 | −0.2 | −3.5 |
| 1842 | AGAGGGCCATGTTTCAATTC | SEQ ID NO:2616 | 1.1 | −23.8 | 70 | −24.4 | 0 | −7.6 |
| 2110 | ATCAACATCATAGCCTCTCA | SEQ ID NO:2617 | 1.1 | −23.2 | 68.3 | −24.3 | 0 | −3.2 |
| 2600 | CTTGGCAAACCCTTCCCTAA | SEQ ID NO:2618 | 1.1 | −26.8 | 71.3 | −27.2 | −0.5 | −4 |
| 2689 | CAATAAAATTTTTCAGTTTT | SEQ ID NO:2619 | 1.1 | −14.6 | 49.1 | −15.7 | 0 | −6.7 |
| 2991 | TCATTTAAAAAATAAAAGAC | SEQ ID NO:2620 | 1.1 | −9.9 | 39.5 | −10.3 | −0.5 | −5 |
| 283 | AATAAGCTGGGTTTTGCAGG | SEQ ID NO:2621 | 1.2 | −22.6 | 66.5 | −22.9 | −0.7 | −5.2 |
| 686 | GAAAATGAACACTTTTAAAC | SEQ ID NO:2622 | 1.2 | −13.2 | 45.5 | −14.4 | 0 | −4.4 |
| 778 | GAGTATAGGAATGTGATCAG | SEQ ID NO:2623 | 1.2 | −19.2 | 60.2 | −20.4 | 0 | −7.4 |
| 1023 | TGCACAGCTCGTCCGGGGTG | SEQ ID NO:2624 | 1.2 | −30.5 | 82 | −31 | −0.5 | −7 |
| 1854 | TCCACCAAAGCCAGAGGGCC | SEQ ID NO:2625 | 1.2 | −29.9 | 78.4 | −28.4 | −2.7 | −6.6 |
| 2410 | AAGAAAATAATAGCTAGAAT | SEQ ID NO:2626 | 1.2 | −12.8 | 44.9 | −14 | 0 | −6.3 |
| 2637 | AAACAAATTTCAAAATAAAT | SEQ ID NO:2627 | 1.2 | −9.6 | 38.9 | −10.8 | 0 | −4.5 |
| 235 | TCCATCAAATCCCACACCAG | SEQ ID NO:2628 | 1.3 | −25.7 | 69.6 | −27 | 0 | −1.1 |
| 896 | CACTTGCATCAGAAGCAAAG | SEQ ID NO:2629 | 1.3 | −20.5 | 60.8 | −19.9 | −1.9 | −8.8 |
| 1113 | ACGACAGACTCTGGCTGCTC | SEQ ID NO:2630 | 1.3 | −26.5 | 75.4 | −26.9 | −0.7 | −6.8 |
| 1627 | AAGCATGATCTCTTTGCGTC | SEQ ID NO:2631 | 1.3 | −23.4 | 69 | −23 | −1.7 | −6.4 |
| 1850 | CCAAAGCCAGAGGGCCATGT | SEQ ID NO:2632 | 1.3 | −28.5 | 76 | −27.7 | −2.1 | −9.5 |
| 1926 | TGCTGAAGAGCATTCTGACA | SEQ ID NO:2633 | 1.3 | −22.6 | 66.7 | −21.6 | −2.3 | −8.6 |
| 2290 | GGAATAATTATAACTGATAT | SEQ ID NO:2634 | 1.3 | −14.3 | 48.1 | −15.6 | 0 | −6.2 |
| 2703 | GATATAAATCCTACcAATAA | SEQ ID NO:2635 | 1.3 | −16.8 | 52.3 | −18.1 | 0 | −2.7 |
| 2811 | TAAGGATTGAGACCCACCAA | SEQ ID NO:2636 | 1.3 | −23.2 | 64.8 | −24 | −0.2 | −3.7 |
| 2892 | TCTTCAAATTTAAAATCATA | SEQ ID NO:2637 | 1.3 | −13.7 | 47 | −15 | 0 | −5 |
| 3018 | AACAAGATAAAATATGTCAT | SEQ ID NO:2638 | 1.3 | −13.7 | 46.7 | −15 | 0 | −3.5 |
| 285 | TTAATAAGCTGGGTTTTGCA | SEQ ID NO:2639 | 1.4 | −21.2 | 63.5 | −21.7 | −0.8 | −5.1 |
| 754 | AAGTTTATGTTCACTCCGTA | SEQ ID NO:2640 | 1.4 | −22 | 65.8 | −23.4 | 0 | −3.3 |
| 756 | GAAAGTTTATGTTCACTCCG | SEQ ID NO:2641 | 1.4 | −21 | 62.4 | −22.4 | 0 | −4.6 |
| 1542 | CTGGTATAAGCCTTTGTACT | SEQ ID NO:2642 | 1.4 | −22.9 | 67.8 | −23 | −1.2 | −6.2 |
| 2027 | CCACTGAGTGGGGCACCTTG | SEQ ID NO:2643 | 1.4 | −28.9 | 79.1 | −28.3 | −2 | −8.7 |
| 2389 | TTTCTGATACAGATTCCAAT | SEQ ID NO:2644 | 1.4 | −19.8 | 60.4 | −19.9 | −1.2 | −6.2 |
| 3017 | ACAAGATAAAATATGTCATT | SEQ ID NO:2645 | 1.4 | −14.5 | 48.5 | −15.9 | 0 | −3.2 |
| 1343 | CTCGAAAGACTGGTGTGTTT | SEQ ID NO:2646 | 1.5 | −22 | 65 | −22.2 | −1.2 | −5.2 |
| 1551 | ACAAACTGGCTGGTATAAGC | SEQ ID NO:2647 | 1.5 | −21.4 | 63 | −22 | −0.7 | −5.5 |
| 2042 | TGCCCTGCAAGCAGTCCACT | SEQ ID NO:2648 | 1.5 | −30.4 | 81.9 | −31 | −0.6 | −9.3 |
| 2157 | GATATTCCTCACTCTACAGT | SEQ ID NO:2649 | 1.5 | −23 | 69.5 | −24.5 | 0 | −2.8 |
| 2721 | TAAGGCTAACCAAACTTAGA | SEQ ID NO:2650 | 1.5 | −18.9 | 56.9 | −19 | −1.3 | −5.2 |
| 2897 | TCCCATCTTCAAATTTAAAA | SEQ ID NO:2651 | 1.5 | −18 | 54.8 | −19.5 | 0 | −5 |
| 274 | GGTTTTGCAGGCATTGGCTT | SEQ ID NO:2652 | 1.6 | −27 | 78 | −27.1 | −1.3 | −9.8 |
| 1848 | AAAGCCAGAGGGCCATGTTT | SEQ ID NO:2653 | 1.6 | −26 | 72.3 | −24.9 | −2.7 | −9.5 |
| 2097 | CCTCTCAGCACAGCAAGGTG | SEQ ID NO:2654 | 1.6 | −26.9 | 76.5 | −27.6 | −0.7 | −5.2 |
| 2117 | GTGGGAAATCAACATCATAG | SEQ ID NO:2655 | 1.6 | −18.9 | 57.8 | −20 | −0.2 | −3.6 |
| 2288 | AATAATTATAACTGATATAT | SEQ ID NO:2656 | 1.6 | −12.2 | 44 | −13.8 | 0 | −6.2 |
| 2357 | ATTCAAAGTCCTCCACAAAT | SEQ ID NO:2657 | 1.6 | −20.9 | 61.1 | −22.5 | 0 | −2.5 |
| 2615 | CATCTTCTCTTAAAACTTGG | SEQ ID NO:2658 | 1.6 | −18.8 | 58.3 | −20.4 | 0 | −2.3 |
| 2772 | GCTTCCTAAATTTCTTCCAC | SEQ ID NO:2659 | 1.6 | −23.3 | 67.9 | −24.9 | 0 | −4.9 |
| 3015 | AAGATAAAATATGTCATTCA | SEQ ID NO:2660 | 1.6 | −14.7 | 49.1 | −16.3 | 0 | −2.8 |
| 3016 | CAAGATAAAATATGTCATTC | SEQ ID NO:2661 | 1.6 | −14.7 | 49.1 | −16.3 | 0 | −2.8 |
| 1254 | GTTGCTACACCAGCATGGTA | SEQ ID NO:2662 | 1.7 | −26.1 | 74.9 | −25.1 | −2.7 | −9.6 |
| 1390 | AGTATCTGCTGTCTCACCTG | SEQ ID NO:2663 | 1.7 | −25.6 | 76.3 | −27.3 | 0 | −3.6 |
| 1668 | CTCAGTACTTCCTTAATCAA | SEQ ID NO:2664 | 1.7 | −20.9 | 63.3 | −22.6 | 0 | −5.7 |
| 1843 | CAGAGGGCCATGTTTCAATT | SEQ ID NO:2665 | 1.7 | −24.1 | 69.6 | −25.8 | 0 | −6.8 |
| 2024 | CTGAGTGGGGCACCTTGATC | SEQ ID NO:2666 | 1.7 | −27 | 76.9 | −26.7 | −2 | −6.7 |
| 2156 | ATATTCCTCACTCTACAGTC | SEQ ID NO:2667 | 1.7 | −22.8 | 69.8 | −24.5 | 0 | −2.8 |
| 2419 | CATTCTTTAAAGAAAATAAT | SEQ ID NO:2668 | 1.7 | −12.1 | 43.6 | −11.8 | −0.9 | −12.2 |
| 2439 | TCCAGAAATGCAACACCCAG | SEQ ID NO:2669 | 1.7 | −23.9 | 65.6 | −24.9 | −0.4 | −5.6 |
| 284 | TAATAAGCTGGGTTTTGCAG | SEQ ID NO:2670 | 1.8 | −21.1 | 63.3 | −22 | −0.8 | −5.2 |
| 366 | TGTACATCAAATTCTATATC | SEQ ID NO:2671 | 1.8 | −16.7 | 54.3 | −18.5 | 0 | −5.9 |
| 847 | GAAAAGGCAGGTTGTGCTGT | SEQ ID NO:2672 | 1.8 | −23.8 | 69.2 | −23.4 | −2.2 | −5.3 |
| 1209 | AAACGCCGGCATCTCTGGAT | SEQ ID NO:2673 | 1.8 | −26.3 | 70.4 | −26.5 | −0.2 | −11.3 |
| 1271 | CCTCAAGAACTTGACGTGTT | SEQ ID NO:2674 | 1.8 | −22.5 | 64.8 | −23.3 | −0.8 | −8.9 |
| 1557 | AGGGATACAAACTGGCTGGT | SEQ ID NO:2675 | 1.8 | −23.6 | 67.9 | −25.4 | 0 | −5.2 |
| 1656 | TTAATCAAATCAGGCAGCCG | SEQ ID NO:2676 | 1.8 | −22.2 | 63.1 | −23.2 | −0.3 | −9 |
| 1675 | ATCCATGCTCAGTACTTCCT | SEQ ID NO:2677 | 1.8 | −26.3 | 76.2 | −28.1 | 0 | −5.7 |
| 2149 | TCACTCTACAGTCACAGATT | SEQ ID NO:2678 | 1.8 | −22 | 67.5 | −23.8 | 0 | −2.8 |
| 2710 | AAACTTAGATATAAATCCTA | SEQ ID NO:2679 | 1.8 | −15.1 | 49.7 | −16 | −0.7 | −4.2 |
| 2740 | GACAACAAGTCTGAGAAACT | SEQ ID NO:2680 | 1.8 | −18.4 | 56.5 | −19.1 | −1 | −4.4 |
| 2993 | AGTCATTTAAAAAATAAAAG | SEQ ID NO:2681 | 1.8 | −10.3 | 40.2 | −12.1 | 0 | −4.5 |
| 269 | TGCAGGCATTGGCTTCCCAA | SEQ ID NO:2682 | 1.9 | −28.7 | 78 | −28.6 | −2 | −10.1 |
| 695 | CTTGCCCGGGAAAATGAACA | SEQ ID NO:2683 | 1.9 | −23.3 | 63 | −24 | 0 | −10.3 |
| 696 | GCTTGCCCGGGAAAATGAAC | SEQ ID NO:2684 | 1.9 | −24.4 | 65.5 | −25.4 | 0 | −9.6 |
| 984 | ATTCGATGGATAGAAAGACG | SEQ ID NO:2685 | 1.9 | −18.2 | 55.1 | −20.1 | 0 | −4.7 |
| 1238 | GGTAACTTGTTCCACAAGCA | SEQ ID NO:2686 | 1.9 | −23.7 | 68.6 | −23.6 | −2 | −7.3 |
| 1243 | AGCATGGTAACTTGTTCCAC | SEQ ID NO:2687 | 1.9 | −23.7 | 69.6 | −24 | −1.5 | −7.2 |
| 1250 | CTACACCAGCATGGTAACTT | SEQ ID NO:2688 | 1.9 | −23.5 | 67.6 | −22.7 | −2.7 | −8.2 |
| 1347 | TCATCTCGAAAGACTGGTGT | SEQ ID NO:2689 | 1.9 | −22.1 | 65.3 | −23.3 | −0.4 | −4.5 |
| 2025 | ACTGAGTGGGGCACCTTGAT | SEQ ID NO:2690 | 1.9 | −26.8 | 75.8 | −26.7 | −2 | −6.7 |
| 2080 | GTGGAAAGCCAGCAACTGTA | SEQ ID NO:2691 | 1.9 | −23.9 | 68 | −24.3 | −1.4 | −6.6 |
| 2379 | AGATTCCAATATAGATTCCA | SEQ ID NO:2692 | 1.9 | −20.3 | 61.1 | −22.2 | 0 | −2.7 |
| 47 | GCACACACGAGCTTCGGTGG | SEQ ID NO:2693 | 2 | −27.5 | 75.1 | −26.3 | −3.2 | −10.9 |
| 681 | TGAACACTTTTAAACACAAG | SEQ ID NO:2694 | 2 | −15.6 | 50.4 | −17.6 | 0 | −4.4 |
| 1568 | CAAACATCACAAGGGATACA | SEQ ID NO:2695 | 2 | −19.1 | 57.2 | −21.1 | 0 | −3.5 |
| 1669 | GCTCAGTACTTCCTTAATCA | SEQ ID NO:2696 | 2 | −23.4 | 69.9 | −25.4 | 0 | −5.7 |
| 1674 | TCCATGCTCAGTACTTCCTT | SEQ ID NO:2697 | 2 | −26.4 | 76.7 | −28.4 | 0 | −5.7 |
| 2426 | CACCCAGCATTCTTTAAAGA | SEQ ID NO:2698 | 2 | −22.6 | 64.9 | −23.8 | 0 | −9.4 |
| 282 | ATAAGCTGGGTTTTGCAGGC | SEQ ID NO:2699 | 2.1 | −25.1 | 73.2 | −26.3 | −0.8 | −5.2 |
| 753 | AGTTTATGTTCACTCCGTAC | SEQ ID NO:2700 | 2.1 | −22.9 | 68.8 | −25 | 0 | −3.4 |
| 790 | GCCTGTTCTGTAGAGTATAG | SEQ ID NO:2701 | 2.1 | −23.4 | 71.7 | −25.5 | 0 | −3.2 |
| 1030 | GAGTGTTTGCACAGCTCGTC | SEQ ID NO:2702 | 2.1 | −26.1 | 77.1 | −25.5 | −2.7 | −9.1 |
| 1241 | CATGGTAACTTGTTCCACAA | SEQ ID NO:2703 | 2.1 | −21.9 | 64.1 | −22.4 | −1.5 | −7.2 |
| 1556 | GGGATACAAACTGGCTGGTA | SEQ ID NO:2704 | 2.1 | −23.3 | 67.1 | −25.4 | 0 | −5.5 |
| 2096 | CTCTCAGCACAGCAAGGTGG | SEQ ID NO:2705 | 2.1 | −26.1 | 75.5 | −27.3 | −0.7 | −5.5 |
| 2384 | GATACAGATTCCAATATAGA | SEQ ID NO:2706 | 2.1 | −18.3 | 56.9 | −20.4 | 0 | −2.7 |
| 2893 | ATCTTCAAATTTAAAATCAT | SEQ ID NO:2707 | 2.1 | −14 | 47.6 | −16.1 | 0 | −5 |
| 685 | AAAATGAACACTTTTAAACA | SEQ ID NO:2708 | 2.2 | −13.3 | 45.6 | −15.5 | 0 | −4.4 |
| 1244 | CAGCATGGTAACTTGTTCCA | SEQ ID NO:2709 | 2.2 | −24.2 | 70.2 | −25.5 | −0.8 | −6.5 |
| 1541 | TGGTATAAGCCTTTGTACTG | SEQ ID NO:2710 | 2.2 | −22 | 65.7 | −22.9 | −1.2 | −6.2 |
| 1553 | ATACAAACTGGCTGGTATAA | SEQ ID NO:2711 | 2.2 | −19.3 | 58.3 | −21.5 | 0 | −5.5 |
| 2155 | TATTCCTCACTCTACAGTCA | SEQ ID NO:2712 | 2.2 | −23.5 | 71 | −25.7 | 0 | −2.8 |
| 897 | GCACTTGCATCAGAAGCAAA | SEQ ID NO:2713 | 2.3 | −22.3 | 64.5 | −22.7 | −1.9 | −8.8 |
| 1465 | TATGGAACTGCCAACTGTGT | SEQ ID NO:2715 | 2.3 | −23.2 | 66.7 | −24.1 | −1.3 | −5.4 |
| 2291 | TGGAATAATTATAACTGATA | SEQ ID NO:2715 | 2.3 | −14.3 | 48.1 | −16.6 | 0 | −6.2 |
| 2713 | ACCAAACTTAGATATAAATC | SEQ ID NO:2716 | 2.3 | −15.4 | 50.1 | −16.8 | −0.7 | −3.8 |
| 2720 | AAGGCTAACCAAACTTAGAT | SEQ ID NO:2717 | 2.3 | −19.2 | 57.4 | −20.1 | −1.3 | −4.6 |
| 2741 | AGACAACAAGTCTGAGAAAC | SEQ ID NO:2718 | 2.3 | −17.5 | 54.8 | −18 | −1.8 | −6.1 |
| 3020 | AGAACAAGATAAAATATGTC | SEQ ID NO:2719 | 2.3 | −13.6 | 46.7 | −15.9 | 0 | −3.3 |
| 950 | CTGCAACATCATCATCTTCC | SEQ ID NO:2720 | 2.4 | −23.6 | 68.9 | −26 | 0 | −4.9 |
| 994 | AGTTCGTTTAATTCGATGGA | SEQ ID NO:2721 | 2.4 | −20.6 | 61.7 | −22.1 | −0.7 | −6.3 |
| 1256 | GTGTTGCTACACCAGCATGG | SEQ ID NO:2722 | 2.4 | −26.4 | 75.3 | −26.4 | −2.4 | −9.9 |
| 1666 | CAGTACTTCCTTAATCAAAT | SEQ ID NO:2723 | 2.4 | −18.9 | 58 | −21.3 | 0 | −5.7 |
| 2358 | TATTCAAAGTCCTCCACAAA | SEQ ID NO:2724 | 2.4 | −20.6 | 60.6 | −23 | 0 | −2.5 |
| 2464 | TGTCTTCTCAGATTGAAGTG | SEQ ID NO:2725 | 2.4 | −20.8 | 64.9 | −21.9 | −1.2 | −5.9 |
| 2990 | CATTTAAAAAATAAAAGACT | SEQ ID NO:2726 | 2.4 | −10.4 | 40.3 | −12.1 | −0.5 | −5 |
| 3009 | AAATATGTCATTCAGCAGTC | SEQ ID NO:2727 | 2.4 | −19.9 | 61.9 | −22.3 | 0 | −4.1 |
| 293 | CTTTCTTCTTAATAAGCTGG | SEQ ID NO:2728 | 2.5 | −19.8 | 61.2 | −22.3 | 0 | −5.1 |
| 1258 | ACGTGTTGCTACACCAGCAT | SEQ ID NO:2729 | 2.5 | −26.2 | 73.4 | −26.3 | −2.4 | −9.1 |
| 1431 | GTTAAAGCTCCTCTCTCCTT | SEQ ID NO:2730 | 2.5 | −25.6 | 74.7 | −28.1 | 0 | −4.5 |
| 2359 | TTATTCAAAGTCCTCCACAA | SEQ ID NO:2731 | 2.5 | −21.4 | 62.9 | −23.9 | 0 | −2.5 |
| 2894 | CATCTTCAAATTTAAAATCA | SEQ ID NO:2732 | 2.5 | −14.7 | 48.8 | −17.2 | 0 | −5 |
| 2896 | CCCATCTTCAAATTTAAAAT | SEQ ID NO:2733 | 2.5 | −17.6 | 53.7 | −20.1 | 0 | −5 |
| 70 | GAGTGGCTGGCGGGATCGGG | SEQ ID NO:2734 | 2.6 | −30.1 | 80.9 | −31.8 | −0.7 | −5.5 |
| 290 | TCTTCTTAATAAGCTGGGTT | SEQ ID NO:2735 | 2.6 | −21.2 | 64.7 | −23.8 | 0 | −5.1 |
| 737 | GTACACCAATCAACAGAGGG | SEQ ID NO:2736 | 2.6 | −22.3 | 64.6 | −24.9 | 0 | −4.6 |
| 1259 | GACGTGTTGCTACACCAGCA | SEQ ID NO:2737 | 2.6 | −26.8 | 74.7 | −27.2 | −2.2 | −9.6 |
| 1386 | TCTGCTGTCTCACCTGATTG | SEQ ID NO:2738 | 2.6 | −25.4 | 74.6 | −28 | 0 | −3.6 |
| 1471 | CCGTGATATGGAACTGCCAA | SEQ ID NO:2739 | 2.6 | −24.3 | 66.3 | −25.5 | −1.3 | −5.2 |
| 1472 | CCCGTGATATGGAACTGCCA | SEQ ID NO:2740 | 2.6 | −27 | 71.6 | −28.4 | −1.1 | −4.8 |
| 1667 | TCAGTACTTCCTTAATCAAA | SEQ ID WO:2741 | 2.6 | −19.3 | 59.3 | −21.9 | 0 | −5.7 |
| 2331 | GAAAATGTAAGAGGTAACTT | SEQ ID NO:2742 | 2.6 | −15.9 | 51.4 | −17.2 | −1.2 | −3.5 |
| 2711 | CAAACTTAGATATAAATCCT | SEQ ID NO:2743 | 2.6 | −16.1 | 51.4 | −17.9 | −0.6 | −4.2 |
| 898 | AGCACTTGCATCAGAAGCAA | SEQ ID NO:2744 | 2.7 | −23 | 66.9 | −24.1 | −1.5 | −8.3 |
| 1385 | CTGCTGTCTCACCTGATTGA | SEQ ID NO:2745 | 2.7 | −25.6 | 74.2 | −28.3 | 0 | −3.6 |
| 2031 | CAGTCCACTGAGTGGGGCAC | SEQ ID NO:2746 | 2.7 | −28.2 | 80.1 | −28.6 | −2.3 | −10.6 |
| 2085 | GCAAGGTGGAAAGCCAGCAA | SEQ ID NO:2747 | 2.7 | −24.9 | 68.8 | −26 | −1.6 | −6.9 |
| 2150 | CTCACTCTACAGTCACAGAT | SEQ ID NO:2748 | 2.7 | −22.8 | 69.2 | −25.5 | 0 | −2.8 |
| 2420 | GCATTCTTTAAAGAAAATAA | SEQ ID NO:2749 | 2.7 | −13.9 | 47.1 | −14.6 | −0.9 | −12.2 |
| 2987 | TTAAAAAATAAAAGACTACA | SEQ ID NO:2750 | 2.7 | −10.2 | 40 | −12.9 | 0 | −2.2 |
| 2994 | CAGTCATTTAAAAAATAAAA | SEQ ID NO:2751 | 2.7 | −11 | 41.4 | −13 | −0.5 | −5 |
| 351 | ATATCCAAATCCATATCTTG | SEQ ID NO:2752 | 2.8 | −19.6 | 59 | −22.4 | 0 | −2.4 |
| 1342 | TCGAAAGACTGGTGTGTTTC | SEQ ID NO:2753 | 2.8 | −21.5 | 64.5 | −21.9 | −2.4 | −4.9 |
| 1687 | CTGAATTTCGTCATCCATGC | SEQ ID NO:2754 | 2.8 | −23.4 | 67.4 | −26.2 | 0 | −5 |
| 2111 | AATCAACATCATAGCCTCTC | SEQ ID NO:2755 | 2.8 | −21.8 | 64.9 | −24.6 | 0 | −3.2 |
| 2417 | TTCTTTAAAGAAAATAATAG | SEQ ID NO:2756 | 2.8 | −11.1 | 41.9 | −12.3 | −0.4 | −11.2 |
| 2447 | GTGGAGGGTCCAGAAATGCA | SEQ ID NO:2757 | 2.8 | −25.4 | 72.1 | −26.3 | −1.9 | −8.7 |
| 2448 | AGTGGAGGGTCCAGAAATGC | SEQ ID NO:2758 | 2.8 | −24.7 | 71.2 | −25.6 | −1.9 | −6.2 |
| 64 | CTGGCGGGATCGGGGGTGCA | SEQ ID NO:2759 | 2.9 | −31.4 | 82.8 | −33.4 | −0.7 | −6.8 |
| 679 | AACACTTTTAAACACAAGTG | SEQ ID NO:2760 | 2.9 | −16.2 | 51.8 | −16.9 | −2.2 | −8.4 |
| 738 | CGTACACCAATCAACAGAGG | SEQ ID NO:2761 | 2.9 | −21.9 | 62.5 | −24.8 | 0 | −4.8 |
| 2475 | TAGAAACATATTGTCTTCTC | SEQ ID NO:2762 | 2.9 | −17.9 | 57.4 | −19.1 | −1.7 | −6.3 |
| 2714 | AACCAAACTTAGATATAAAT | SEQ ID NO:2763 | 2.9 | −14.3 | 47.5 | −16.3 | −0.7 | −3 |
| 260 | TGGCTTCCCAATCTTTATCA | SEQ ID NO:2764 | 3 | −24.7 | 70.8 | −26.8 | −0.8 | −3.7 |
| 275 | GGGTTTTGCAGGCATTGGCT | SEQ ID NO:2765 | 3 | −28.1 | 80.3 | −29.6 | −1.3 | −9.8 |
| 1257 | CGTGTTGCTACACCAGCATG | SEQ ID NO:2766 | 3 | −26 | 72.6 | −26.9 | −2.1 | −6 |
| 1481 | AATCTGTCTCCCGTGATATG | SEQ ID NO:2767 | 3 | −23.8 | 68.3 | −26.8 | 0 | −3.3 |
| 1927 | TTGCTGAAGAGCATTCTGAC | SEQ ID NO:2768 | 3 | −22 | 65.8 | −22.5 | −2.5 | −8.8 |
| 2647 | AACAAAACAGAAACAAATTT | SEQ ID NO:2769 | 3 | −11.9 | 42.8 | −14.9 | 0 | −4.3 |
| 2742 | TAGACAACAAGTCTGAGAAA | SEQ ID NO:2770 | 3 | −17 | 53.8 | −18 | −2 | −6.8 |
| 1341 | CGAAAGACTGGTGTGTTTCT | SEQ ID NO:2771 | 3.1 | −22 | 65 | −21.9 | −3.2 | −6.4 |
| 2388 | TTCTGATACAGATTCCAATA | SEQ ID NO:2772 | 3.1 | −19.4 | 59.5 | −21.2 | −1.2 | −6.2 |
| 2743 | ATAGACAACAAGTCTGAGAA | SEQ ID NO:2773 | 3.1 | −17.7 | 55.6 | −18.8 | −2 | −6.8 |
| 2754 | ACCTACAGATAATAGACAAC | SEQ ID NO:2774 | 3.1 | −18 | 55.6 | −21.1 | 0 | −2.4 |
| 745 | TTCACTCCGTACACCAATCA | SEQ ID NO:2775 | 3.2 | −24.6 | 68.9 | −27.8 | 0 | −4.8 |
| 755 | AAAGTTTATGTTCACTCCGT | SEQ ID NO:2776 | 3.2 | −21.6 | 64.2 | −24.8 | 0 | −3.7 |
| 1475 | TCTCCCGTGATATGGAACTG | SEQ ID NO:2777 | 3.2 | −24.2 | 68 | −26.9 | −0.2 | −3.5 |
| 1938 | CGAGCAACCACTTGCTGAAG | SEQ ID NO:2778 | 3.2 | −23.9 | 66.3 | −23.5 | −3.6 | −8.4 |
| 2434 | AAATGCAACACCCAGCATTC | SEQ ID NO:2779 | 3.2 | −23.2 | 64.9 | −23.3 | −3.1 | −8.4 |
| 2808 | GGATTGAGACCCACCAATGC | SEQ ID NO:2780 | 3.2 | −26 | 70.9 | −28.3 | −0.7 | −4.1 |
| 771 | GGAATGTGATCAGTAGAAAG | SEQ ID NO:2781 | 3.3 | −18.1 | 56.7 | −21.4 | 0 | −6.6 |
| 798 | TTGTCTTTGCCTGTTCTGTA | SEQ ID NO:2782 | 3.3 | −25 | 75.4 | −28.3 | 0 | −3 |
| 813 | TTGCAGCTTCCTTTCTTGTC | SEQ ID NO:2783 | 3.3 | −25.9 | 77.5 | −29.2 | 0 | −5.2 |
| 901 | GACAGCACTTGCATCAGAAG | SEQ ID NO:2784 | 3.3 | −22.7 | 66.8 | −25.1 | −0.7 | −7 |
| 1430 | TTAAAGCTCCTCTCTCCTTA | SEQ ID NO:2785 | 3.3 | −24.1 | 70.6 | −27.4 | 0 | −5 |
| 1470 | CGTGATATGGAACTGCCAAC | SEQ ID NO:2786 | 3.3 | −22.5 | 63.5 | −24.4 | −1.3 | −5.2 |
| 2719 | AGGCTAACCAAACTTAGATA | SEQ ID NO:2787 | 3.3 | −19.6 | 58.7 | −21.5 | −1.3 | −4.4 |
| 2732 | GTCTGAGAAACTAAGGCTAA | SEQ ID NO:2788 | 3.3 | −19.3 | 58.9 | −22.6 | 0 | −3.7 |
| 2988 | TTTAAAAAATAAAAGACTAC | SEQ ID NO:2789 | 3.3 | −9.6 | 39 | −12.9 | 0 | −4 |
| 1844 | CCAGAGGGCCATGTTTCAAT | SEQ ID NO:2790 | 3.4 | −26 | 72.8 | −28.9 | 0 | −7.6 |
| 1937 | GAGCAACCACTTGCTGAAGA | SEQ ID NO:2791 | 3.4 | −23.7 | 67.3 | −23.5 | −3.6 | −8.4 |
| 2114 | GGAAATCAACATCATAGCCT | SEQ ID NO:2792 | 3.4 | −21.2 | 61.9 | −24.6 | 0 | −3.2 |
| 2646 | ACAAAACAGAAACAAATTTC | SEQ ID NO:2793 | 3.4 | −13 | 45 | −15 | −1.3 | −4.5 |
| 2648 | AAACAAAACAGAAACAAATT | SEQ ID NO:2794 | 3.4 | −11.1 | 41.3 | −14.5 | 0 | −2.9 |
| 291 | TTCTTCTTAATAAGCTGGGT | SEQ ID NO:2795 | 3.5 | −21.2 | 64.7 | −24.7 | 0 | −5.1 |
| 2712 | CCAAACTTAGATATAAATCC | SEQ ID NO:2796 | 3.5 | −17.2 | 53.2 | −19.8 | −0.7 | −4.2 |
| 2745 | TAATAGACAACAAGTCTGAG | SEQ ID NO:2797 | 3.5 | −16.8 | 53.7 | −18.3 | −2 | −5.7 |
| 281 | TAAGCTGGGTTTTGCAGGCA | SEQ ID NO:2798 | 3.6 | −25.8 | 74.3 | −28.5 | −0.8 | −5.9 |
| 899 | CAGCACTTGCATCAGAAGCA | SEQ ID NO:2799 | 3.6 | −24.4 | 70.3 | −27.1 | −0.8 | −7.5 |
| 993 | GTTCGTTTAATTCGATGGAT | SEQ ID NO:2800 | 3.6 | −20.6 | 61.5 | −23.3 | −0.7 | −6.3 |
| 1350 | ACATCATCTCGAAAGACTGG | SEQ ID NO:2801 | 3.6 | −20.6 | 61 | −23.5 | −0.4 | −4.5 |
| 2639 | AGAAACAAATTTCAAAATAA | SEQ ID NO:2802 | 3.6 | −10.9 | 41.2 | −12.1 | −2.4 | −5.6 |
| 3012 | ATAAAATATGTCATTCAGCA | SEQ ID NO:2803 | 3.6 | −17.3 | 54.7 | −20.9 | 0 | −4.1 |
| 3029 | TGATTTTAAAGAACAAGATA | SEQ ID NO:2804 | 3.6 | −13.6 | 46.7 | −17.2 | 0 | −4.6 |
| 812 | TGCAGCTTCCTTTCTTGTCT | SEQ ID NO:2805 | 3.7 | −26.7 | 79.2 | −30.4 | 0 | −4.9 |
| 1239 | TGGTAACTTGTTCCACAAGC | SEQ ID NO:2806 | 3.7 | −23 | 67.3 | −23.8 | −2.9 | −8.2 |
| 1476 | GTCTCCCGTGATATGGAACT | SEQ ID NO:2807 | 3.7 | −25.4 | 71.3 | −29.1 | 0 | −3.5 |
| 2033 | AGCAGTCCACTGAGTGGGGC | SEQ ID NO:2808 | 3.7 | −29.1 | 83.5 | −30.5 | −2.3 | −10.6 |
| 2113 | GAAATCAACATCATAGCCTC | SEQ ID NO:2809 | 3.7 | −20.4 | 60.8 | −24.1 | 0 | −3.2 |
| 2381 | ACAGATTCCAATATAGATTC | SEQ ID NO:2810 | 3.7 | −18.5 | 57.8 | −22.2 | 0 | −2.7 |
| 2807 | GATTGAGACCCACCAATGCA | SEQ ID NO:2811 | 3.7 | −25.5 | 69.5 | −28.3 | −0.7 | −5.5 |
| 1346 | CATCTCGAAAGACTGGTGTG | SEQ ID NO:2812 | 3.8 | −21.7 | 63.8 | −24.8 | −0.4 | −4.5 |
| 1348 | ATCATCTCGAAAGACTGGTG | SEQ ID NO:2813 | 3.8 | −20.9 | 62.2 | 24 | −0.4 | −4.5 |
| 1432 | AGTTAAAGCTCCTCTCTCCT | SEQ ID NO:2815 | 3.8 | 25.5 | 74.6 | −29.3 | 0 | −5 |
| 1469 | GTGATATGGAACTGCCAACT | SEQ ID NO:2815 | 3.8 | −22.6 | 65 | −25 | −1.3 | −5.2 |
| 1661 | CTTCCTTAATCAAATCAGGC | SEQ ID NO:2816 | 3.8 | −21.2 | 62.8 | −25 | 0 | −3.2 |
| 2158 | AGATATTCCTCACTCTACAG | SEQ ID NO:2817 | 3.8 | −21.8 | 66.3 | −25.6 | 0 | −2.8 |
| 3010 | AAAATATGTCATTCAGCAGT | SEQ ID NO:2818 | 3.8 | −18.8 | 58.4 | −22.6 | 0 | −4.1 |
| 794 | CTTTGCCTGTTCTGTAGAGT | SEQ ID NO:2819 | 3.9 | −25.1 | 75.4 | −29 | 0 | −3.2 |
| 1240 | ATGGTAACTTGTTCCACAAG | SEQ ID NO:2820 | 3.9 | −21.2 | 63.1 | −22.4 | −2.7 | −7.9 |
| 1251 | GCTACACCAGCATGGTAACT | SEQ ID NO:2821 | 3.9 | −25.2 | 71.4 | −26.6 | −2.5 | −8.2 |
| 1567 | AAACATCACAAGGGATACAA | SEQ ID NO:2822 | 3.9 | −17.7 | 54.3 | −21.6 | 0 | −3.5 |
| 2116 | TGGGAAATCAACATCATAGC | SEQ ID NO:2823 | 3.9 | −19.5 | 58.8 | −23.4 | 0 | −2.9 |
| 2154 | ATTCCTCACTCTACAGTCAC | SEQ ID NO:2824 | 3.9 | −24 | 72.3 | −27.9 | 0 | −2.8 |
| 357 | AATTCTATATCCAAATCCAT | SEQ ID NO:2825 | 4 | −18.9 | 57.2 | −22.9 | 0 | −2.4 |
| 1417 | CTCCTTACAGTAACGAAGAC | SEQ ID NO:2826 | 4 | −20.8 | 61.4 | −24.8 | 0 | −4.7 |
| 1660 | TTCCTTAATCAAATCAGGCA | SEQ ID NO:2827 | 4 | −21 | 62.1 | −25 | 0 | −4 |
| 2047 | GAGAATGCCCTGCAAGCAGT | SEQ ID NO:2828 | 4 | −26.7 | 73.7 | −29.8 | −0.5 | −9.3 |
| 2151 | CCTCACTCTACAGTCACAGA | SEQ ID NO:2829 | 4 | −24.8 | 73.1 | −28.8 | 0 | −2.8 |
| 797 | TGTCTTTGCCTGTTCTGTAG | SEQ ID NO:2830 | 4.1 | −24.9 | 75.3 | −29 | 0 | −3 |
| 1673 | CCATGCTCAGTACTTCCTTA | SEQ ID NO:2831 | 4.1 | −25.7 | 74.3 | −29.8 | 0 | −5.7 |
| 2387 | TCTGATACAGATTCCAATAT | SEQ ID NO:2832 | 4.1 | −19.3 | 59.2 | −22.4 | −0.9 | −5.7 |
| 2438 | CCAGAAATGCAACACCCAGC | SEQ ID NO:2833 | 4.1 | −25.3 | 68 | −28.7 | −0.4 | −5.6 |
| 2643 | AAACAGAAACAAATTTCAAA | SEQ ID NO:2834 | 4.1 | −12.1 | 43.2 | −14.6 | −1.6 | −4.7 |
| 3011 | TAAAATATGTCATTCAGCAG | SEQ ID NO:2835 | 4.1 | −17.3 | 54.9 | −21.4 | 0 | −4.1 |
| 268 | GCAGGCATTGGCTTCCCAAT | SEQ ID NO:2836 | 4.2 | −28.7 | 78.2 | −30.3 | −2.6 | −8.9 |
| 952 | TGCTGCAACATCATCATCTT | SEQ ID NO:2837 | 4.2 | −23 | 67.7 | −27.2 | 0 | −7.1 |
| 985 | AATTCGATGGATAGAAAGAC | SEQ ID NO:2838 | 4.2 | −16.7 | 52.6 | −20.9 | 0 | −4.7 |
| 1355 | AGCAAACATCATCTCGAAAG | SEQ ID NO:2839 | 4.2 | −18.8 | 56.6 | −23 | 0 | −4.5 |
| 1401 | AGACCCATCAAAGTATCTGC | SEQ ID NO:2840 | 4.2 | −23.2 | 67.1 | −26.7 | −0.4 | −3 |
| 1480 | ATCTGTCTCCCGTGATATGG | SEQ ID NO:2841 | 4.2 | −25.7 | 73.2 | −29.9 | 0 | −3.1 |
| 2030 | AGTCCACTGAGTGGGGCACC | SEQ ID NO:2842 | 4.2 | −29.5 | 82.7 | −31.4 | −2.3 | −10.6 |
| 2649 | AAAACAAAACAGAAACAAAT | SEQ ID NO:2843 | 4.2 | −10.3 | 39.9 | −14.5 | 0 | −0.9 |
| 3040 | GCTCTGTGTTGTGATTTTAA | SEQ ID NO:2844 | 4.2 | −21.6 | 66.4 | −25.8 | 0 | −2.8 |
| 262 | ATTGGCTTCCCAATCTTTAT | SEQ ID NO:2845 | 4.3 | −23.7 | 68.5 | −25.4 | −2.6 | −6.8 |
| 356 | ATTCTATATCCAAATCCATA | SEQ ID NO:2846 | 4.3 | −19.3 | 58.5 | −23.6 | 0 | −2.1 |
| 358 | AAATTCTATATCCAAATCCA | SEQ ID NO:2847 | 4.3 | −18.2 | 55.4 | −22.5 | 0 | −3.1 |
| 744 | TCACTCCGTACACCAATCAA | SEQ ID NO:2848 | 4.3 | −23.8 | 66.5 | −28.1 | 0 | −4.8 |
| 796 | GTCTTTGCCTGTTCTGTAGA | SEQ ID NO:2849 | 4.3 | −25.5 | 77 | −29.8 | 0 | −3 |
| 1429 | TAAAGCTCCTCTCTCCTTAC | SEQ ID NO:2850 | 4.3 | −24.2 | 70.8 | −28.5 | 0 | −5 |
| 2053 | CACGCTGAGAATGCCCTGCA | SEQ ID NO:2851 | 4.3 | −28.1 | 74.3 | −31.5 | −0.8 | −4.9 |
| 2810 | AAGGATTGAGACCCACCAAT | SEQ ID NO:2852 | 4.3 | −23.5 | 65.3 | −27.1 | −0.5 | −4.1 |
| 2821 | GCAAATATGTTAAGGATTGA | SEQ ID NO:2853 | 4.3 | −17.6 | 55 | −21.9 | 0 | −3.5 |
| 2989 | ATTTAAAAAATAAAAGACTA | SEQ ID NO:2854 | 4.3 | −9.4 | 38.6 | −13 | −0.5 | −5 |
| 3021 | AAGAACAAGATAAAATATGT | SEQ ID NO:2855 | 4.3 | −12.5 | 44.2 | −16.8 | 0 | −3.1 |
| 261 | TTGGCTTCCCAATCTTTATC | SEQ ID NO:2856 | 4.4 | −24.1 | 70.1 | −26.8 | −1.7 | −5 |
| 280 | AAGCTGGGTTTTGCAGGCAT | SEQ ID NO:2857 | 4.4 | −26.1 | 74.9 | −29.6 | −0.8 | −6 |
| 352 | TATATCCAAATCCATATCTT | SEQ ID NO:2858 | 4.4 | −19.3 | 58.5 | −23.7 | 0 | −2.4 |
| 1381 | TGTCTCACCTGATTGACTAA | SEQ ID NO:2859 | 4.4 | −22.1 | 65.7 | −25.6 | −0.7 | −5.3 |
| 1851 | ACCAAAOCCAGAGGGCCATG | SEQ ID NO:2860 | 4.4 | −27.5 | 73.4 | −29.2 | −2.7 | −9.5 |
| 2086 | AGCAAGGTGGAAAGCCAGCA | SEQ ID NO:2861 | 4.4 | −25.6 | 71.3 | −27.6 | −2.4 | −6.7 |
| 2162 | CTATAGATATTCCTCACTCT | SEQ ID NO:2862 | 4.5 | −21.8 | 67 | −26.3 | 0 | −2.8 |
| 2715 | TAACCAAACTTAGATATAAA | SEQ ID NO:2863 | 4.5 | −14 | 47 | −17.6 | −0.7 | −2.7 |
| 953 | CTGCTGCAACATCATCATCT | SEQ ID NO:2864 | 4.6 | −23.8 | 69.3 | −28.4 | 0 | −7.3 |
| 1383 | GCTGTCTCACCTGATTGACT | SEQ ID NO:2865 | 4.6 | −25.8 | 75 | −29.5 | −0.7 | −5.3 |
| 1435 | CACAGTTAAAGCTCCTCTCT | SEQ ID NO:2866 | 4.6 | −23.8 | 70.1 | −28.4 | 0 | −5 |
| 2435 | GAAATGCAACACCCAGCATT | SEQ ID NO:2867 | 4.6 | −23.4 | 64.7 | −25.1 | −2.9 | −8.2 |
| 2716 | CTAACCAAACTTAGATATAA | SEQ ID NO:2868 | 4.6 | −15.6 | 50.3 | −19.5 | −0.5 | −3.2 |
| 3013 | GATAAAATATGTCATTCAGC | SEQ ID NO:2869 | 4.6 | −17.2 | 54.7 | −21.8 | 0 | −2.8 |
| 1466 | ATATGGAACTGCCAACTGTG | SEQ ID NO:2870 | 4.7 | −22 | 63.6 | −25.3 | −1.3 | −5.4 |
| 1554 | GATACAAACTGGCTGGTATA | SEQ ID NO:2871 | 4.7 | −20.6 | 61.5 | −24.8 | −0.2 | −5.5 |
| 1839 | GGGCCATGTTTCAATTCACC | SEQ ID NO:2872 | 4.7 | −26.1 | 73.5 | −30.3 | 0 | −7.6 |
| 2599 | TTGGCAAACCCTTCCCTAAC | SEQ ID NO:2873 | 4.7 | −26.1 | 70 | −30.1 | −0.5 | −4 |
| 2644 | AAAACAGAAACAAATTTCAA | SEQ ID NO:2874 | 4.7 | −12.1 | 43.2 | −14.4 | −2.4 | 5.5 |
| 784 | TCTGTAGAGTATAGGAATGT | SEQ ID NO:2875 | 4.8 | −19.7 | 62.2 | −24.5 | 0 | −2.6 |
| 1382 | CTGTCTCACCTGATTGACTA | SEQ ID NO:2876 | 4.8 | −23.7 | 69.9 | −27.6 | −0.7 | −5.3 |
| 1657 | CTTAATCAAATCAGGCAGCC | SEQ ID NO:2877 | 4.8 | −22.3 | 64.6 | −26.6 | 0 | −7.7 |
| 1670 | TGCTCAGTACTTCCTTAATC | SEQ ID NO:2878 | 4.8 | −22.7 | 68.6 | −27.5 | 0 | −5.5 |
| 2731 | TCTGAGAAACTAAGGCTAAC | SEQ ID NO:2879 | 4.8 | −18.3 | 56.5 | −23.1 | 0 | −3.7 |
| 2805 | TTGAGACCCACCAATGCACT | SEQ ID NO:2880 | 4.8 | −26 | 70.7 | −30.8 | 0 | −5.5 |
| 2820 | CAAATATGTTAAGGATTGAG | SEQ ID NO:2881 | 4.8 | −15.8 | 51.3 | −20.6 | 0 | −2.7 |
| 279 | AGCTGGGTTTTGCAGGCATT | SEQ ID NO:2882 | 4.9 | −26.9 | 77.9 | −30.9 | −0.8 | −6 |
| 795 | TCTTTGCCTGTTCTGTAGAG | SEQ ID NO:2883 | 4.9 | −24.3 | 73.5 | −29.2 | 0 | −3.2 |
| 986 | TAATTCGATGGATAGAAAGA | SEQ ID NO:2884 | 4.9 | −16.2 | 51.6 | −21.1 | 0 | −4.7 |
| 1246 | ACCAGCATGGTAACTTGTTC | SEQ ID NO:2885 | 4.9 | −23.7 | 69.6 | −26.1 | −2.5 | −8.8 |
| 1356 | AAGCAAACATCATCTCGAAA | SEQ ID NO:2886 | 4.9 | −18.1 | 54.7 | −23 | 0 | −4.5 |
| 2755 | CACCTACAGATAATAGACAA | SEQ ID NO:2887 | 4.9 | −18.5 | 56.3 | −23.4 | 0 | −2.4 |
| 1245 | CCAGCATGGTAACTTGTTCC | SEQ ID NO:2888 | 5 | −25.5 | 72.7 | −27.9 | −2.6 | −7.4 |
| 1340 | GAAAGACTGGTGTGTTTCTG | SEQ ID NO:2889 | 5 | −21.2 | 64.5 | −23.5 | −2.7 | −6.6 |
| 2044 | AATGCCCTGCAAGCAGTCCA | SEQ ID NO:2890 | 5 | −28.6 | 76.9 | −32.4 | −1 | −9.3 |
| 2725 | AAACTAAGGCTAACCAAACT | SEQ ID NO:2891 | 5 | −18.2 | 54.6 | −21.8 | −1.3 | −3.7 |
| 2730 | CTGAGAAACTAAGGCTAACC | SEQ ID NO:2892 | 5 | −19.9 | 58.9 | −24.4 | −0.2 | −3.7 |
| 1665 | AGTACTTCCTTAATCAAATC | SEQ ID NO:2893 | 5.1 | −18.6 | 58 | −23.7 | 0 | −5.5 |
| 2043 | ATGCCCTGCAAGCAGTCCAC | SEQ ID NO:2894 | 5.1 | −29.5 | 80 | −33.5 | −1 | −9.1 |
| 2050 | GCTGAGAATGCCCTGCAAGC | SEQ ID NO:2895 | 5.1 | −27.5 | 74.9 | −31.5 | −1 | −6.2 |
| 2386 | CTGATACAGATTCCAATATA | SEQ ID NO:2896 | 5.1 | −18.6 | 57.3 | −23.7 | 0 | −3.5 |
| 2421 | AGCATTCTTTAAAGAAAATA | SEQ ID NO:2897 | 5.1 | −14.6 | 48.7 | −17.7 | −0.9 | −12.2 |
| 2641 | ACAGAAACAAATTTCAAAAT | SEQ ID NO:2898 | 5.1 | −12.8 | 44.6 | −15.5 | −2.4 | −5.5 |
| 783 | CTGTAGAGTATAGGAATGTG | SEQ ID NO:2899 | 5.2 | −19.3 | 60.6 | −24.5 | 0 | −2.2 |
| 2112 | AAATCAACATCATAGCCTCT | SEQ ID NO:2900 | 5.2 | −20.7 | 61.4 | −25.9 | 0 | −3.2 |
| 2422 | CAGCATTCTTTAAAGAAAAT | SEQ ID NO:2901 | 5.2 | −15.6 | 50.5 | −19 | −0.4 | −11.7 |
| 988 | TTTAATTCGATGGATAGAAA | SEQ ID NO:2902 | 5.3 | −15.8 | 50.9 | −21.1 | 0 | −4.7 |
| 990 | CGTTTAATTCGATGGATAGA | SEQ ID NO:2903 | 5.3 | −19.2 | 57.8 | −24.5 | 0 | −4.7 |
| 1566 | AACATCACAAGGGATACAAA | SEQ ID NO:2904 | 5.3 | −17.7 | 54.3 | −23 | 0 | −3.5 |
| 2046 | AGAATGCCCTGCAAGCAGTC | SEQ ID NO:2905 | 5.3 | −26.5 | 74 | −29.5 | −2.2 | −11.6 |
| 2425 | ACCCAGCATTCTTTAAAGAA | SEQ ID NO:2906 | 5.3 | −21.2 | 61.7 | −24.7 | −0.7 | −11.8 |
| 2640 | CAGAAACAAATTTCAAAATA | SEQ ID NO:2907 | 5.3 | −12.3 | 43.7 | −15.2 | −2.4 | −5.6 |
| 2650 | AAAAACAAAACAGAAACAAA | SEQ ID NO:2908 | 5.3 | −9.6 | 38.8 | −14.9 | 0 | 0 |
| 987 | TTAATTCGATGGATAGAAAG | SEQ ID NO:2909 | 5.4 | −15.7 | 50.7 | −21.1 | 0 | −4.4 |
| 1275 | AGCTCCTCAAGAACTTGACG | SEQ ID NO:2910 | 5.4 | −23.1 | 66 | −27.5 | −0.8 | −8.9 |
| 1377 | TCACCTGATTGACTAAGGAA | SEQ ID NO:2911 | 5.4 | −20.7 | 61.3 | −25.2 | −0.7 | −4 |
| 1380 | GTCTCACCTGATTGACTAAG | SEQ ID NO:2912 | 5.4 | −22.1 | 66 | −27.5 | 0 | −4.5 |
| 1479 | TCTGTCTCCCGTGATATGGA | SEQ ID NO:2913 | 5.4 | −26.3 | 74.6 | −31.2 | −0.2 | −3.4 |
| 2437 | CAGAAATGCAACACCCAGCA | SEQ ID NO:2915 | 5.4 | −24 | 65.7 | −28.3 | −1 | −5.6 |
| 2642 | AACAGAAACAAATTTCAAAA | SEQ ID NO:2915 | 5.4 | −12.1 | 43.2 | −15.1 | −2.4 | −5.5 |
| 746 | GTTCACTCCGTACACCAATC | SEQ ID NO:2916 | 5.5 | −25.1 | 71 | −30.6 | 0 | −4.8 |
| 761 | CAGTAGAAAGTTTATGTTCA | SEQ ID NO:2917 | 5.5 | −18.3 | 58.3 | −23.8 | 0.3 | −4.6 |
| 989 | GTTTAATTCGATGGATAGAA | SEQ ID NO:2918 | 5.5 | −17.7 | 55.3 | −23.2 | 0 | −4.7 |
| 1253 | TTGCTACACCAGCATGGTAA | SEQ ID NO:2919 | 5.5 | −24.2 | 69.2 | −27 | −2.7 | −9 |
| 2034 | AAGCAGTCCACTGAGTGGGG | SEQ ID NO:2920 | 5.5 | −26.6 | 76.1 | −29.8 | −2.3 | −9.2 |
| 2147 | ACTCTACAGTCACAGATTTG | SEQ ID NO:2921 | 5.5 | −21 | 64.8 | −26.5 | 0 | −2.8 |
| 2160 | ATAGATATTCCTCACTCTAC | SEQ ID NO:2922 | 5.5 | −20.8 | 64.2 | −26.3 | 0 | −3.2 |
| 276 | TGGGTTTTGCAGGCATTGGC | SEQ ID NO:2923 | 5.6 | −27.2 | 78 | −31.8 | −0.5 | −9.6 |
| 1357 | AAAGCAAACATCATCTCGAA | SEQ ID NO:2924 | 5.6 | −18.1 | 54.7 | −23.7 | 0 | −4.5 |
| 1478 | CTGTCTCCCGTGATATGGAA | SEQ ID NO:2925 | 5.6 | −25.2 | 70.6 | −30.3 | −0.2 | −3.5 |
| 1840 | AGGGCCATGTTTCAATTCAC | SEQ ID NO:2926 | 5.6 | −24.1 | 70.1 | −29.2 | 0 | −7.6 |
| 2146 | CTCTACAGTCACAGATTTGG | SEQ ID NO:2927 | 5.6 | −22 | 67 | −27.6 | 0 | −3.2 |
| 2161 | TATAGATATTCCTCACTCTA | SEQ ID NO:2928 | 5.6 | −20.3 | 63 | −25.9 | 0 | −3.1 |
| 2895 | CCATCTTCAAATTTAAAATC | SEQ ID NO:2929 | 5.6 | −16 | 51.3 | −21.6 | 0 | −5 |
| 353 | CTATATCCAAATCCATATCT | SEQ ID NO:2930 | 5.7 | −20.1 | 60 | −25.8 | 0 | −2.4 |
| 954 | ACTGCTGCAACATCATCATC | SEQ ID NO:2931 | 5.7 | −23.1 | 67.9 | −28.8 | 0 | −7.3 |
| 1564 | CATCACAAGGGATACAAACT | SEQ ID NO:2932 | 5.7 | −19.3 | 57.8 | −25 | 0 | −3.5 |
| 1565 | ACATCACAAGGGATACAAAC | SEQ ID NO:2933 | 5.7 | −18.6 | 56.5 | −24.3 | 0 | −3.5 |
| 1719 | TGAGAAACTAAGGCTAACCA | SEQ ID NO:2934 | 5.7 | −19.7 | 58.3 | −24 | −1.3 | −3.8 |
| 2159 | TAGATATTCCTCACTCTACA | SEQ ID NO:2935 | 5.8 | −21.5 | 65.5 | −27.3 | 0 | −2.8 |
| 2382 | TACAGATTCCAATATAGATT | SEQ ID NO:2936 | 5.8 | −17.8 | 55.9 | −23.6 | 0 | −2.7 |
| 2436 | AGAAATGCAACACCCAGCAT | SEQ ID NO:2937 | 5.8 | −23.3 | 64.6 | −27.2 | −1.9 | −6.2 |
| 355 | TTCTATATCCAAATCCATAT | SEQ ID NO:2938 | 5.9 | −19.3 | 58.5 | −25.2 | 0 | −2.4 |
| 781 | GTAGAGTATAGGAATGTGAT | SEQ ID NO:2939 | 5.9 | −19 | 60 | −24.9 | 0 | −2.2 |
| 2052 | ACGCTGAGAATGCCCTGCAA | SEQ ID NO:2940 | 5.9 | −26.7 | 71.2 | −31.5 | −1 | −5.3 |
| 2804 | TGAGACCCACCAATGCACTA | SEQ ID NO:2941 | 5.9 | −25.6 | 69.8 | −31.5 | 0 | −5.5 |
| 2809 | AGGATTGAGACCCACCAATG | SEQ ID NO:2942 | 5.9 | −24.2 | 67.2 | −29.2 | −0.7 | −3.9 |
| 779 | AGAGTATAGGAATGTGATCA | SEQ ID NO:2943 | 6 | −19.2 | 60.2 | −25.2 | 0 | −7.2 |
| 789 | CCTGTTCTGTAGAGTATAGG | SEQ ID NO:2944 | 6 | −22.8 | 69.8 | −28.8 | 0 | −3 |
| 1376 | CACCTGATTGACTAAGGAAA | SEQ ID NO:2945 | 6 | −19.6 | 58.1 | −24.7 | −0.7 | −4 |
| 1555 | GGATACAAACTGGCTGGTAT | SEQ ID NO:2946 | 6 | −22.1 | 64.6 | −28.1 | 0 | −5.5 |
| 2035 | CAAGCAGTCCACTGAGTGGG | SEQ ID NO:2947 | 6 | −26.1 | 74.6 | −29.8 | −2.3 | −9.2 |
| 2115 | GGGAAATCAACATCATAGCC | SEQ ID NO:2948 | 6 | −21.5 | 62.5 | −27.5 | 0 | −3.2 |
| 2822 | TGCAAATATGTTAAGGATTG | SEQ ID NO:2949 | 6 | −17 | 53.7 | −23 | 0 | −4.7 |
| 3014 | AGATAAAATATGTCATTCAG | SEQ ID NO:2950 | 6 | −15.4 | 50.9 | −21.4 | 0 | −2.8 |
| 762 | TCAGTAGAAAGTTTATGTTC | SEQ ID NO:2951 | 6.1 | −18 | 58.4 | −24.1 | 0 | −4.6 |
| 992 | TTCGTTTAATTCGATGGATA | SEQ ID NO:2952 | 6.1 | −19.1 | 58 | −24.3 | −0.7 | −6.3 |
| 2986 | TAAAAAATAAAAGACTACAG | SEQ ID NO:2953 | 6.1 | −10.1 | 39.8 | −16.2 | 0 | −2.2 |
| 760 | AGTAGAAAGTTTATGTTCAC | SEQ ID NO:2954 | 6.2 | −17.8 | 57.5 | −23.3 | −0.5 | −4 |
| 363 | ACATCAAATTCTATATCCAA | SEQ ID NO:2955 | 6.3 | −17.8 | 55.2 | −24.1 | 0 | −3.1 |
| 1349 | CATCATCTCGAAAGACTGGT | SEQ ID NO:2956 | 6.3 | −21.6 | 63.5 | −27.3 | −0.3 | −4.5 |
| 1433 | CAGTTAAAGCTCCTCTCTCC | SEQ ID NO:2957 | 6.3 | −25.3 | 73.7 | −31.6 | 0 | −5 |
| 743 | CACTCCGTACACCAATCAAC | SEQ ID NO:2958 | 6.4 | −23.6 | 65.6 | −30 | 0 | −4.8 |
| 1351 | AACATCATCTCGAAAGACTG | SEQ ID NO:2959 | 6.4 | −18.7 | 56.7 | −24.4 | −0.4 | −4.5 |
| 2632 | AATTTCAAAATAAATCACAT | SEQ ID NO:2960 | 6.4 | −12.8 | 44.8 | −19.2 | 0 | −4 |
| 359 | CAAATTCTATATCCAAATCC | SEQ ID NO:2961 | 6.5 | −18.2 | 55.4 | −24.7 | 0 | −3.1 |
| 1270 | CTCAAGAACTTGACGTGTTG | SEQ ID NO:2962 | 6.5 | −20.5 | 61.1 | −26 | −0.8 | −8.9 |
| 1672 | CATGCTCAGTACTTCCTTAA | SEQ ID NO:2963 | 6.5 | −23 | 68.1 | −29.5 | 0 | −5.7 |
| 1671 | ATGCTCAGTACTTCCTTAAT | SEQ ID NO:2964 | 6.6 | −22.3 | 66.9 | −28.9 | 0 | −5.7 |
| 1930 | CACTTGCTGAAGAGCATTCT | SEQ ID NO:2965 | 6.6 | −23 | 67.8 | −27.1 | −2.5 | −6.5 |
| 2026 | CACTGAGTGGGGCACCTTGA | SEQ ID NO:2966 | 6.6 | −27.5 | 76.9 | −32.1 | −2 | −8.2 |
| 278 | GCTGGGTTTTGCAGGCATTG | SEQ ID NO:2967 | 6.7 | −26.9 | 77.4 | −32.7 | −0.7 | −6 |
| 1550 | CAAACTGGCTGGTATAAGCC | SEQ ID NO:2968 | 6.7 | −23.2 | 66.1 | −27.5 | −2.4 | −8.5 |
| 2423 | CCAGCATTCTTTAAAGAAAA | SEQ ID NO:2969 | 6.7 | −17.6 | 54.1 | −22.3 | −0.9 | −12.2 |
| 2728 | GAGAAACTAAGGCTAACCAA | SEQ ID NO:2970 | 6.7 | −19 | 56.6 | −24.3 | −1.3 | −3.8 |
| 264 | GCATTGGCTTCCCAATCTTT | SEQ ID NO:2971 | 6.9 | −26.5 | 74.4 | −30.6 | −2.8 | −7.9 |
| 780 | TAGAGTATAGGAATGTGATC | SEQ ID NO:2972 | 6.9 | −18.2 | 58.3 | −25.1 | 0 | −4 |
| 782 | TGTAGAGTATAGGAATGTGA | SEQ ID NO:2973 | 6.9 | −19 | 60 | −25.9 | 0 | −2.2 |
| 1928 | CTTGCTGAAGAGCATTCTGA | SEQ ID NO:2974 | 6.9 | −22.7 | 67.2 | −27.1 | −2.5 | −7.2 |
| 2806 | ATTGAGACCCACCAATGCAC | SEQ ID NO:2975 | 6.9 | −25.1 | 68.9 | −31.5 | −0.1 | −5.5 |
| 362 | CATCAAATTCTATATCCAAA | SEQ ID NO:2976 | 7 | −16.9 | 53 | −23.9 | 0 | −2.6 |
| 1936 | AGCAACCACTTGCTGAAGAG | SEQ ID NO:2977 | 7 | −23.1 | 66.3 | −27 | −3.1 | −7.7 |
| 2145 | TCTACAGTCACAGATTTGGC | SEQ ID NO:2978 | 7 | −22.9 | 69.4 | −29.9 | 0 | −3.2 |
| 785 | TTCTGTAGAGTATAGGAATG | SEQ ID NO:2979 | 7.1 | −18.6 | 59.3 | −25.7 | 0 | −3.2 |
| 1252 | TGCTACACCAGCATGGTAAC | SEQ ID NO:2980 | 7.2 | −24.3 | 69.4 | −28.8 | −2.7 | −9 |
| 1560 | ACAAGGGATACAAACTGGCT | SEQ ID NO:2981 | 7.2 | −21.4 | 62.1 | −28.6 | 0 | −3.7 |
| 2049 | CTGAGAATGCCCTGCAAGCA | SEQ ID NO:2982 | 7.2 | −26.4 | 71.9 | −32.5 | −1 | −8.8 |
| 2631 | ATTTCAAAATAAATCACATC | SEQ ID NO:2983 | 7.2 | −13.9 | 47.2 | −21.1 | 0 | −3.1 |
| 2726 | GAAACTAAGGCTAACCAAAC | SEQ ID NO:2984 | 7.2 | −17.9 | 54.1 | −23.7 | −1.3 | −3.7 |
| 263 | CATTGGCTTCCCAATCTTTA | SEQ ID NO:2985 | 7.3 | −24.4 | 69.6 | −28.9 | −2.8 | −7 |
| 265 | GGCATTGGCTTCCCAATCTT | SEQ ID NO:2986 | 7.3 | −27.6 | 76.6 | −32.1 | −2.8 | −8.7 |
| 1929 | ACTTGCTGAAGAGCATTCTG | SEQ ID NO:2987 | 7.3 | −22.3 | 66.5 | −27.1 | −2.5 | −6.5 |
| 747 | TGTTCACTCCGTACACCAAT | SEQ ID NO:2988 | 7.4 | −24.7 | 69.3 | −32.1 | 0 | −4.8 |
| 1658 | CCTTAATCAAATCAGGCAGC | SEQ ID NO:2989 | 7.4 | −22.3 | 64.6 | −29.7 | 0 | −4.1 |
| 266 | AGGCATTGGCTTCCCAATCT | SEQ ID NO:2990 | 7.5 | −27.5 | 76.5 | −32.2 | −2.8 | −8.7 |
| 2383 | ATACAGATTCCAATATAGAT | SEQ ID NO:2991 | 7.5 | −17.7 | 55.6 | −25.2 | 0 | −2.7 |
| 1563 | TCACAAGGGATACAAACTG | SEQ ID NO:2992 | 7.6 | −18.6 | 56.5 | −26.2 | 0 | −3.3 |
| 1375 | ACCTGATTGACTAAGGAAAA | SEQ ID NO:2993 | 7.7 | −18.2 | 55.2 | −25 | −0.7 | −4 |
| 2048 | TGAGAATGCCCTGCAAGCAG | SEQ ID NO:2994 | 7.7 | −25.5 | 70.4 | −32.1 | −1 | −9.1 |
| 1269 | TCAAGAACTTGACGTGTTGC | SEQ ID NO:2995 | 7.8 | −21.4 | 63.2 | −28.3 | −0.6 | −8.7 |
| 292 | TTTCTTCTTAATAAGCTGGG | SEQ ID NO:2996 | 7.9 | −20.1 | 61.8 | −28 | 0 | −5.1 |
| 361 | ATCAAATTCTATATCCAAAT | SEQ ID NO:2997 | 8 | −16.2 | 51.8 | −24.2 | 0 | −3.1 |
| 786 | GTTCTGTAGAGTATAGGAAT | SEQ ID NO:2998 | 8.1 | −19.8 | 62.7 | −27.9 | 0 | −3.4 |
| 2385 | TGATACAGATTCCAATATAG | SEQ ID NO:2999 | 8.1 | −17.7 | 55.6 | −25.8 | 0 | −2.7 |
| 1934 | CAACCACTTGCTGAAGAGCA | SEQ ID NO:3000 | 8.2 | −23.8 | 67.2 | −29.7 | −2.3 | −6.2 |
| 2051 | CGCTGAGAATGCCCTGCAAG | SEQ ID NO:3001 | 8.3 | −26.5 | 70.9 | −33.7 | −1 | −5.3 |
| 2727 | AGAAACTAAGGCTAACCAAA | SEQ ID NO:3002 | 8.3 | −17.7 | 53.7 | −24.6 | −1.3 | −3.7 |
| 360 | TCAAATTCTATATCCAAATC | SEQ ID NO:3003 | 8.4 | −16.6 | 52.9 | −25 | 0 | −3.1 |
| 1360 | GAAAAAGCAAACATCATCTC | SEQ ID NO:3004 | 8.4 | −16.6 | 52.3 | −25 | 0 | −4.1 |
| 1379 | TCTCACCTGATTGACTAAGG | SEQ ID NO:3005 | 8.4 | −22.1 | 65.4 | −30.5 | 0.6 | −3.7 |
| 1467 | GATATGGAACTGCCAACTGT | SEQ ID NO:3006 | 8.4 | −22.6 | 65 | −29.6 | −1.3 | −5.2 |
| 1477 | TGTCTCCCGTGATATGGAAC | SEQ ID NO:3007 | 8.4 | −24.5 | 69.3 | −32.4 | −0.2 | −3.5 |
| 1664 | GTACTTCCTTAATCAAATCA | SEQ ID NO:3008 | 8.4 | −19.3 | 59.1 | −27.7 | 0 | −4 |
| 1853 | CCACCAAAGCCAGAGGGCCA | SEQ ID NO:3009 | 8.4 | −30.2 | 77.8 | −35.9 | −2.7 | −7.6 |
| 1359 | AAAAAGCAAACATCATCTCG | SEQ ID NO:3010 | 8.5 | −16.8 | 52 | −25.3 | 0 | −3.3 |
| 2744 | AATAGACAACAAGTCTGAGA | SEQ ID NO:3011 | 8.5 | −17.7 | 55.6 | −24.2 | −2 | −6.6 |
| 3027 | ATTTTAAAGAACAAGATAAA | SEQ ID NO:3012 | 8.5 | −11.6 | 42.6 | −20.1 | 0 | −4.6 |
| 900 | ACAGCACTTGCATCAGAAGC | SEQ ID NO:3013 | 8.6 | −23.9 | 69.8 | −31.6 | −0.7 | −7 |
| 3025 | TTTAAAGAACAAGATAAAAT | SEQ ID NO:3015 | 8.6 | −10.8 | 41 | −19.4 | 0 | −4 |
| 3026 | TTTTAAAGAACAAGATAAAA | SEQ ID NO:3015 | 8.6 | −10.9 | 41.3 | −19.5 | 0 | −4.6 |
| 1434 | ACAGTTAAAGCTCCTCTCTC | SEQ ID NO:3016 | 8.7 | −23.5 | 70.5 | −32.2 | 0 | −5 |
| 1852 | CACCAAAGCCAGAGGGCCAT | SEQ ID NO:3017 | 8.7 | −28.2 | 74.6 | −34.2 | −2.7 | −7.6 |
| 2045 | GAATGCCCTGCAAGCAGTCC | SEQ ID NO:3018 | 8.7 | −28.5 | 77.2 | −35.3 | −1.8 | −10.8 |
| 3028 | GATTTTAAAGAACAAGATAA | SEQ ID NO:3019 | 8.7 | −12.9 | 45.2 | −21.6 | 0 | −4.6 |
| 1358 | AAAAGCAAACATCATCTCGA | SEQ ID NO:3020 | 8.8 | −18.1 | 54.7 | −26.9 | 0 | −4.2 |
| 1558 | AAGGGATACAAACTGGCTGG | SEQ ID NO:3021 | 8.8 | −21.7 | 62.8 | −30.5 | 0 | −3.8 |
| 1562 | TCACAAGGGATACAAACTGG | SEQ ID NO:3022 | 8.8 | −19.8 | 58.9 | −28.6 | 0 | −2.4 |
| 1935 | GCAACCACTTGCTGAAGAGC | SEQ ID NO:3023 | 8.8 | −24.9 | 70.1 | −31.4 | −2.3 | −7.4 |
| 1931 | CCACTTGCTGAAGAGCATTC | SEQ ID NO:3024 | 8.9 | −24.1 | 69.5 | −30.8 | −2.2 | −6.2 |
| 2717 | GCTAACCAAACTTAGATATA | SEQ ID NO:3025 | 8.9 | −18.1 | 55.6 | −27 | 0 | −3.2 |
| 1468 | TGATATGGAACTGCCAACTG | SEQ ID NO:3026 | 9.1 | −21.4 | 61.9 | −29.6 | −0.8 | −5.2 |
| 1561 | CACAAGGGATACAAACTGGC | SEQ ID NO:3027 | 9.1 | −21.2 | 61.5 | −30.3 | 0 | −2.8 |
| 1559 | CAAGGGATACAAACTGGCTG | SEQ ID NO:3028 | 9.3 | −21.2 | 61.5 | −30.5 | 0 | −3.7 |
| 267 | CAGGCATTGGCTTCCCAATC | SEQ ID NO:3029 | 9.4 | −27.3 | 75.6 | −34.1 | −2.6 | −8.7 |
| 277 | CTGGGTTTTGCAGGCATTGG | SEQ ID NO:3030 | 9.4 | −26.3 | 75.5 | −35.7 | 0 | −6 |
| 2153 | TTCCTCACTCTACAGTCACA | SEQ ID NO:3031 | 9.4 | −24.7 | 73.5 | −34.1 | 0 | −2.8 |
| 1663 | TACTTCCTTAATCAAATCAG | SEQ ID NO:3032 | 9.5 | −18.1 | 56.4 | −27.6 | 0 | −2.3 |
| 3024 | TTAAAGAACAAGATAAAATA | SEQ ID NO:3033 | 9.5 | −10.4 | 40.3 | −19.9 | 0 | −2 |
| 2718 | GGCTAACCAAACTTAGATAT | SEQ ID NO:3034 | 9.6 | −19.6 | 58.6 | −28.5 | −0.5 | −3.7 |
| 2424 | CCCAGCATTCTTTAAAGAAA | SEQ ID NO:3035 | 9.7 | −20.3 | 59.4 | −28 | −0.9 | −12.2 |
| 1659 | TCCTTAATCAAATCAGGCAG | SEQ ID NO:3036 | 9.8 | −20.9 | 62 | −30.7 | 0 | −4 |
| 1378 | CTCACCTGATTGACTAAGGA | SEQ ID NO:3037 | 10 | −22.3 | 65.2 | −31.4 | −0.7 | −4 |
| 1933 | AACCACTTGCTGAAGAGCAT | SEQ ID NO:3038 | 10.1 | −23.1 | 66 | −30.7 | −2.5 | −6.5 |
| 3023 | TAAAGAACAAGATAAAATAT | SEQ ID NO:3039 | 10.1 | −10.3 | 40.1 | −20.4 | 0 | −2.4 |
| 1352 | AAACATCATCTCGAAAGACT | SEQ ID NO:3040 | 10.3 | −18 | 55 | −27.6 | −0.4 | −4.5 |
| 1662 | ACTTCCTTAATCAAATCAGG | SEQ ID NO:3041 | 10.3 | −19.6 | 59.4 | −29.9 | 0 | −3.1 |
| 991 | TCGTTTAATTCGATGGATAG | SEQ ID NO:3042 | 10.5 | −19 | 57.8 | −28.8 | −0.4 | −5.8 |
| 2152 | TCCTCACTCTACAGTCACAG | SEQ ID NO:3043 | 10.6 | −24.6 | 73.4 | −35.2 | 0 | −2.8 |
| 1354 | GCAAACATCATCTCGAAAGA | SEQ ID NO:3044 | 10.7 | −19.4 | 57.6 | −29.6 | −0.2 | −4.5 |
| 1361 | GGAAAAAGCAAACATCATCT | SEQ ID NO:3045 | 10.9 | −17.4 | 53.5 | −28.3 | 0 | −4.1 |
| 1932 | ACCACTTGCTGAAGAGCATT | SEQ ID NO:3046 | 11 | −23.9 | 68.6 | −32.4 | −2.5 | −6.5 |
| 1370 | ATTGACTAAGGAAAAAGCAA | SEQ ID NO:3047 | 11.2 | −15.6 | 50 | −26.8 | 0 | −4.1 |
| 1363 | AAGGAAAAAGCAAACATCAT | SEQ ID NO:3048 | 11.4 | −15.4 | 49.3 | −26.8 | 0 | −4.1 |
| 1369 | TTGACTAAGGAAAAAGCAAA | SEQ ID NO:3049 | 11.4 | −14.9 | 48.5 | −26.3 | 0 | −4.1 |
| 1362 | AGGAAAAAGCAAACATCATC | SEQ ID NO:3050 | 11.8 | −16.5 | 51.9 | −28.3 | 0 | −4.1 |
| 2022 | AAAGAACAAGATAAAATATG | SEQ ID NO:3051 | 11.8 | −10.6 | 40.6 | −22.4 | 0 | −2.7 |
| 1364 | TAAGGAAAAAGCAAACATCA | SEQ ID NO:3052 | 12.3 | −15.1 | 48.8 | −27.4 | 0 | −4.1 |
| 1353 | CAAACATCATCTCGAAAGAC | SEQ ID NO:3053 | 12.5 | −17.8 | 54.4 | −29.6 | −0.4 | −4.5 |
| 1368 | TGACTAAGGAAAAAGCAAAC | SEQ ID NO:3054 | 12.6 | −15 | 48.7 | −27.6 | 0 | −4.1 |
| 1367 | GACTAAGGAAAAAGCAAACA | SEQ ID NO:3055 | 13 | −15.7 | 49.8 | −28.7 | 0 | −4.1 |
| 788 | CTGTTCTGTAGAGTATAGGA | SEQ ID NO:3056 | 13.8 | −21.4 | 67.2 | −35.2 | 0 | −3.2 |
| 1373 | CTGATTGACTAAGGAAAAAG | SEQ ID NO:3057 | 14.2 | −15.3 | 49.7 | −29.5 | 0 | −2.2 |
| 787 | TGTTCTGTAGAGTATAGGAA | SEQ ID NO:3058 | 14.3 | −19.8 | 62.6 | −34.1 | 0 | −3.4 |
| 1374 | CCTGATTGACTAAGGAAAAA | SEQ ID NO:3059 | 14.4 | −17.3 | 53.1 | −31.7 | 0 | −3.2 |
| 1366 | ACTAAGGAAAAAGCAAACAT | SEQ ID NO:3060 | 14.6 | −15.1 | 48.7 | −29.7 | 0 | −4.1 |
| 1371 | GATTGACTAAGGAAAAAGCA | SEQ ID NO:3061 | 14.9 | −16.9 | 52.8 | −31.8 | 0 | −4.1 |
| 1372 | TGATTGACTAAGGAAAAAGC | SEQ ID NO:3062 | 15.6 | −16.2 | 51.5 | −31.8 | 0 | −2.8 |
| 1365 | CTAAGGAAAAAGCAAACATC | SEQ ID NO:3063 | 15.7 | −15.3 | 49.3 | −31 | 0 | −4.1 |

### Example 15

### Western Blot Analysis of GFAT Protein Levels

[0239] Western blot analysis (immunoblot analysis) is carried out using standard methods. Cells are harvested 16-20 h after oligonucleotide treatment, washed once with PBS, suspended in Laemmli buffer (100 ul/well), boiled for 5 minutes and loaded on a 16% SDS-PAGE gel. Gels are run for 1.5 hours at 150 V, and transferred to membrane for western blotting. Appropriate primary antibody directed to GFAT is used, with a radiolabeled or fluorescently labeled secondary antibody directed against the primary antibody species. Bands are visualized using a PHOSPHORIMAGER™ (Molecular Dynamics, Sunnyvale Calif.).

What is claimed is:

1. An antisense compound 8 to 30 nucleobases in length targeted to a nucleic acid molecule encoding GFAT, wherein said antisense compound specifically hybridizes with and inhibits the expression of GFAT.

2. The antisense compound of claim 1 wherein said GFAT is human GFAT-1.

3. The antisense compound of claim 1 or 2 wherein said antisense compound is an antisense oligonucleotide.

4. The antisense compound of claim 3 wherein said antisense oligonucleotide comprises at least 8 contiguous nucleic acids of a nucleic acid sequence of SEQ ID NO.1-SEQ ID NO:3063.

5. The antisense compound of claim 3 wherein said antisense oligonucleotide comprises a nucleic acid sequence of SEQ ID NO.1-SEQ ID NO:3063.

6. The antisense compound of claim 2 wherein said antisense oligonucleotide consists of at least 8 contiguous nucleic acids of a nucleic acid sequence of SEQ ID NO.1-SEQ ID NO:3063.

7. The antisense compound of claim 2 wherein said antisense oligonucleotide consists of a nucleic acid sequence of SEQ ID NO.1-SEQ ID NO:3063.

8. The antisense compound of claim 2 wherein the antisense oligonucleotide comprises at least one modified internucleoside linkage.

9. The antisense compound of claim 8 wherein the modified internucleoside linkage is a phosphorothioate linkage.

10. The antisense compound of claim 2 or 8 wherein the antisense oligonucleotide comprises at least one modified sugar moiety.

11. The antisense compound of claim 10 wherein the modified sugar moiety is a 2′-O-methoxyethyl sugar moiety.

12. The antisense compound of claim 2 wherein the antisense oligonucleotide comprises at least one modified nucleobase.

13. The antisense compound of claim 12 wherein the modified nucleobase is a 5-methylcytosine.

14. The antisense compound of claim 10 wherein the antisense oligonucleotide comprises at least one modified nucleobase.

15. The antisense compound of claim 14 wherein the modified nucleobase is a 5-methylcytosine.

16. The antisense compound of claim 2 wherein the antisense oligonucleotide is a chimeric oligonucleotide.

17. A composition comprising the antisense compound of claim 2 and a pharmaceutically acceptable carrier or diluent.

18. The composition of claim 17 further comprising a colloidal dispersion system.

19. A method of inhibiting the expression of mPGES1 in cells or tissues comprising contacting said cells or tissues with the antisense compound of claim 2 so that expression of mPGES-1 is inhibited.

20. A method of treating a human having a disease or condition associated with mPGES-1 comprising administering to said animal a therapeutically or prophylactically effective amount of the antisense compound of claim 2 so that expression of mPGES-1 is inhibited.

21. The method of claim 20 wherein the disease or condition is arthritis

22. The method of claim 20 wherein the disease or condition is inflammation

23. The method of claim 20 wherein the disease or condition is pain

24. The method of claim 20 wherein the disease or condition is fever

25. The method of claim 20 wherein the disease or condition is cancer

26. The method of claim 20 wherein the disease or condition is alzheimer's

27. The method of claim 20 wherein the disease or condition is opthamic conditions

28. The method of claim 20 wherein the disease or condition is diabetes.

29. The method of claim 20 wherein the disease or condition is an immunological disorder.

30. The method of claim 20 wherein the disease or condition is a cardiovascular disorder.

31. The method of claim 20 wherein the disease or condition is a neurologic disorder.

32. The method of claim 20 wherein the disease or condition is ischemia/reperfusion injury.

The application's sequence listing, which the Patent Office published only in electronic form, follows.

SEQUENCE LISTING (3071 sequences)

SEQ ID NO: 1 - DNA, 20 bp, artificial
  human GFAT antisense
atggtctcagtatcctcctt

SEQ ID NO: 2 - DNA, 20 bp, artificial
  human GFAT antisense
gggggccggggtggcgccga

SEQ ID NO: 3 - DNA, 20 bp, artificial
  human GFAT antisense
ggtctcagtatcctccttat

SEQ ID NO: 4 - DNA, 20 bp, artificial
  human GFAT antisense
tggtctcagtatcctcctta

SEQ ID NO: 5 - DNA, 20 bp, artificial
  human GFAT antisense
ctcgggggccggggtggcgc

SEQ ID NO: 6 - DNA, 20 bp, artificial
  human GFAT antisense
aatggtctcagtatcctcct

SEQ ID NO: 7 - DNA, 20 bp, artificial
  human GFAT antisense
tttatcagagcgctgggggt

SEQ ID NO: 8 - DNA, 20 bp, artificial
  human GFAT antisense
tcgggggccggggtggcgcc

SEQ ID NO: 9 - DNA, 20 bp, artificial
  human GFAT antisense
ggcttcaaggggtgatattt

SEQ ID NO: 10 - DNA, 20 bp, artificial
  human GFAT antisense
aggcttcaaggggtgatatt

SEQ ID NO: 11 - DNA, 20 bp, artificial
  human GFAT antisense
aggtgtcttgtgttgcttaa

SEQ ID NO: 12 - DNA, 20 bp, artificial
  human GFAT antisense
aaggtgtcttgtgttgctta

SEQ ID NO: 13 - DNA, 20 bp, artificial
  human GFAT antisense
ggctcgggggccggggtggc

SEQ ID NO: 14 - DNA, 20 bp, artificial
  human GFAT antisense
taatggtctcagtatcctcc

SEQ ID NO: 15 - DNA, 20 bp, artificial
  human GFAT antisense
aaggcttcaaggggtgatat

SEQ ID NO: 16 - DNA, 20 bp, artificial
  human GFAT antisense
ggggccggggtggcgccgac

SEQ ID NO: 17 - DNA, 20 bp, artificial
  human GFAT antisense
gcccgcgaggccaggggcga

SEQ ID NO: 18 - DNA, 20 bp, artificial
  human GFAT antisense
ttttatcagagcgctggggg

SEQ ID NO: 19 - DNA, 20 bp, artificial
  human GFAT antisense
ggtgtcttgtgttgcttaat

SEQ ID NO: 20 - DNA, 20 bp, artificial
  human GFAT antisense
gcttcaaggggtgatatttt

SEQ ID NO: 21 - DNA, 20 bp, artificial
  human GFAT antisense
ctttgattttcagtgcccct

SEQ ID NO: 22 - DNA, 20 bp, artificial
  human GFAT antisense
aaaggtgtcttgtgttgctt

SEQ ID NO: 23 - DNA, 20 bp, artificial
  human GFAT antisense
gctcgggggccggggtggcg

SEQ ID NO: 24 - DNA, 20 bp, artificial
  human GFAT antisense
aaaggcttcaaggggtgata

SEQ ID NO: 25 - DNA, 20 bp, artificial
  human GFAT antisense
cccgcgaggccaggggcgag

SEQ ID NO: 26 - DNA, 20 bp, artificial
  human GFAT antisense
ttatcagagcgctgggggtg

SEQ ID NO: 27 - DNA, 20 bp, artificial
  human GFAT antisense
gtctcagtatcctccttatc

SEQ ID NO: 28 - DNA, 20 bp, artificial
  human GFAT antisense
aaaaggcttcaaggggtgat

SEQ ID NO: 29 - DNA, 20 bp, artificial
  human GFAT antisense
gcgggctcgggggccggggt

SEQ ID NO: 30 - DNA, 20 bp, artificial
  human GFAT antisense
cttaatggtctcagtatcct

SEQ ID NO: 31 - DNA, 20 bp, artificial
  human GFAT antisense
ttgactcttcctctcattgt

SEQ ID NO: 32 - DNA, 20 bp, artificial
  human GFAT antisense
gttgactcttcctctcattg

SEQ ID NO: 33 - DNA, 20 bp, artificial
  human GFAT antisense
agttgactcttcctctcatt

SEQ ID NO: 34 - DNA, 20 bp, artificial
  human GFAT antisense
aaaaggtgtcttgtgttgct

SEQ ID NO: 35 - DNA, 20 bp, artificial
  human GFAT antisense
tgactcttcctctcattgtg

SEQ ID NO: 36 - DNA, 20 bp, artificial
  human GFAT antisense
gtcacttgctagttccacca

SEQ ID NO: 37 - DNA, 20 bp, artificial
  human GFAT antisense
cggcccgcgaggccaggggc

SEQ ID NO: 38 - DNA, 20 bp, artificial
  human GFAT antisense
ttaatggtctcagtatcctc

SEQ ID NO: 39 - DNA, 20 bp, artificial
  human GFAT antisense
tcttaatggtctcagtatcc

SEQ ID NO: 40 - DNA, 20 bp, artificial
  human GFAT antisense
caaaaggtgtcttgtgttgc

SEQ ID NO: 41 - DNA, 20 bp, artificial
  human GFAT antisense
ccgcgaggccaggggcgagt

SEQ ID NO: 42 - DNA, 20 bp, artificial
  human GFAT antisense
gatctgctggagttccatct

SEQ ID NO: 43 - DNA, 20 bp, artificial
  human GFAT antisense
tgattttcagtgccccttca

SEQ ID NO: 44 - DNA, 20 bp, artificial
  human GFAT antisense
cgggggccggggtggcgccg

SEQ ID NO: 45 - DNA, 20 bp, artificial
  human GFAT antisense
aacttcttcatccagtgcct

SEQ ID NO: 46 - DNA, 20 bp, artificial
  human GFAT antisense
gagcgctgggggtggctatt

SEQ ID NO: 47 - DNA, 20 bp, artificial
  human GFAT antisense
aagttgactcttcctctcat

SEQ ID NO: 48 - DNA, 20 bp, artificial
  human GFAT antisense
tcagttgtccaaagcagctt

SEQ ID NO: 49 - DNA, 20 bp, artificial
  human GFAT antisense
gggctcgggggccggggtgg

SEQ ID NO: 50 - DNA, 20 bp, artificial
  human GFAT antisense
tttttatcagagcgctgggg

SEQ ID NO: 51 - DNA, 20 bp, artificial
  human GFAT antisense
agtcacttgctagttccacc

SEQ ID NO: 52 - DNA, 20 bp, artificial
  human GFAT antisense
ttgattttcagtgccccttc

SEQ ID NO: 53 - DNA, 20 bp, artificial
  human GFAT antisense
tgcgggctcgggggccgggg

SEQ ID NO: 54 - DNA, 20 bp, artificial
  human GFAT antisense
agcgctgggggtggctattg

SEQ ID NO: 55 - DNA, 20 bp, artificial
  human GFAT antisense
ccaccgggaaaaggcaggtt

SEQ ID NO: 56 - DNA, 20 bp, artificial
  human GFAT antisense
acttcttcatccagtgcctt

SEQ ID NO: 57 - DNA, 20 bp, artificial
  human GFAT antisense
tccaccgggaaaaggcaggt

SEQ ID NO: 58 - DNA, 20 bp, artificial
  human GFAT antisense
tggtgatgattccattgtga

SEQ ID NO: 59 - DNA, 20 bp, artificial
  human GFAT antisense
catcacacatcataagggca

SEQ ID NO: 60 - DNA, 20 bp, artificial
  human GFAT antisense
tccgatcatcacacatcata

SEQ ID NO: 61 - DNA, 20 bp, artificial
  human GFAT antisense
cagttgtccaaagcagcttg

SEQ ID NO: 62 - DNA, 20 bp, artificial
  human GFAT antisense
gaacttcttcatccagtgcc

SEQ ID NO: 63 - DNA, 20 bp, artificial
  human GFAT antisense
tgatctgctggagttccatc

SEQ ID NO: 64 - DNA, 20 bp, artificial
  human GFAT antisense
agttgtccaaagcagcttga

SEQ ID NO: 65 - DNA, 20 bp, artificial
  human GFAT antisense
agagcgctgggggtggctat

SEQ ID NO: 66 - DNA, 20 bp, artificial
  human GFAT antisense
cacttgctagttccaccatc

SEQ ID NO: 67 - DNA, 20 bp, artificial
  human GFAT antisense
tcacttgctagttccaccat

SEQ ID NO: 68 - DNA, 20 bp, artificial
  human GFAT antisense
aaagttgactcttcctctca

SEQ ID NO: 69 - DNA, 20 bp, artificial
  human GFAT antisense
caaagttgactcttcctctc

SEQ ID NO: 70 - DNA, 20 bp, artificial
  human GFAT antisense
tcaaagttgactcttcctct

SEQ ID NO: 71 - DNA, 20 bp, artificial
  human GFAT antisense
tcatcacacatcataagggc

SEQ ID NO: 72 - DNA, 20 bp, artificial
  human GFAT antisense
tctcagtatcctccttatca

SEQ ID NO: 73 - DNA, 20 bp, artificial
  human GFAT antisense
gttggtgatgattccattgt

SEQ ID NO: 74 - DNA, 20 bp, artificial
  human GFAT antisense
tatcagagcgctgggggtgg

SEQ ID NO: 75 - DNA, 20 bp, artificial
  human GFAT antisense
tgctggagttccatctggag

SEQ ID NO: 76 - DNA, 20 bp, artificial
  human GFAT antisense
tcctctcattgtgttcacga

SEQ ID NO: 77 - DNA, 20 bp, artificial
  human GFAT antisense
gtgtcttgtgttgcttaatc

SEQ ID NO: 78 - DNA, 20 bp, artificial
  human GFAT antisense
aaaaaaggcttcaaggggtg

SEQ ID NO: 79 - DNA, 20 bp, artificial
  human GFAT antisense
gttgtccaaagcagcttgaa

SEQ ID NO: 80 - DNA, 20 bp, artificial
  human GFAT antisense
ggccggggtggcgccgacac

SEQ ID NO: 81 - DNA, 20 bp, artificial
  human GFAT antisense
agttgcccttcatgatctgc

SEQ ID NO: 82 - DNA, 20 bp, artificial
  human GFAT antisense
gattttcagtgccccttcaa

SEQ ID NO: 83 - DNA, 20 bp, artificial
  human GFAT antisense
tttgattttcagtgcccctt

SEQ ID NO: 84 - DNA, 20 bp, artificial
  human GFAT antisense
cttcttcatccagtgcctta

SEQ ID NO: 85 - DNA, 20 bp, artificial
  human GFAT antisense
ttcttaatggtctcagtatc

SEQ ID NO: 86 - DNA, 20 bp, artificial
  human GFAT antisense
aaaaaaaggcttcaaggggt

SEQ ID NO: 87 - DNA, 20 bp, artificial
  human GFAT antisense
gggccggggtggcgccgaca

SEQ ID NO: 88 - DNA, 20 bp, artificial
  human GFAT antisense
agttggtgatgattccattg

SEQ ID NO: 89 - DNA, 20 bp, artificial
  human GFAT antisense
cttcctctcattgtgttcac

SEQ ID NO: 90 - DNA, 20 bp, artificial
  human GFAT antisense
ccgatcatcacacatcataa

SEQ ID NO: 91 - DNA, 20 bp, artificial
  human GFAT antisense
atccgatcatcacacatcat

SEQ ID NO: 92 - DNA, 20 bp, artificial
  human GFAT antisense
cgcgaggccaggggcgagtg

SEQ ID NO: 93 - DNA, 20 bp, artificial
  human GFAT antisense
ttcctctcattgtgttcacg

SEQ ID NO: 94 - DNA, 20 bp, artificial
  human GFAT antisense
atttctttgattttcagtgc

SEQ ID NO: 95 - DNA, 20 bp, artificial
  human GFAT antisense
ctccatgtgttgcccaacgg

SEQ ID NO: 96 - DNA, 20 bp, artificial
  human GFAT antisense
ctcttcctctcattgtgttc

SEQ ID NO: 97 - DNA, 20 bp, artificial
  human GFAT antisense
actcttcctctcattgtgtt

SEQ ID NO: 98 - DNA, 20 bp, artificial
  human GFAT antisense
acttgctagttccaccatca

SEQ ID NO: 99 - DNA, 20 bp, artificial
  human GFAT antisense
ccaggaagtcacttgctagt

SEQ ID NO: 100 - DNA, 20 bp, artificial
  human GFAT antisense
acggcccgcgaggccagggg

SEQ ID NO: 101 - DNA, 20 bp, artificial
  human GFAT antisense
gggttctccatgtgttgccc

SEQ ID NO: 102 - DNA, 20 bp, artificial
  human GFAT antisense
tagttggtgatgattccatt

SEQ ID NO: 103 - DNA, 20 bp, artificial
  human GFAT antisense
gtctgtttcagattcgaagt

SEQ ID NO: 104 - DNA, 20 bp, artificial
  human GFAT antisense
gcccttcatgatctgctgga

SEQ ID NO: 105 - DNA, 20 bp, artificial
  human GFAT antisense
catcaaagttgactcttcct

SEQ ID NO: 106 - DNA, 20 bp, artificial
  human GFAT antisense
atcacacatcataagggcaa

SEQ ID NO: 107 - DNA, 20 bp, artificial
  human GFAT antisense
tgtcagttgtccaaagcagc

SEQ ID NO: 108 - DNA, 20 bp, artificial
  human GFAT antisense
tttctcgtctcgttcgagga

SEQ ID NO: 109 - DNA, 20 bp, artificial
  human GFAT antisense
tcttcctctcattgtgttca

SEQ ID NO: 110 - DNA, 20 bp, artificial
  human GFAT antisense
gaagtcacttgctagttcca

SEQ ID NO: 111 - DNA, 20 bp, artificial
  human GFAT antisense
ggaagtcacttgctagttcc

SEQ ID NO: 112 - DNA, 20 bp, artificial
  human GFAT antisense
ctggtctgaatgaagtatgg

SEQ ID NO: 113 - DNA, 20 bp, artificial
  human GFAT antisense
ttgtcagttgtccaaagcag

SEQ ID NO: 114 - DNA, 20 bp, artificial
  human GFAT antisense
attgtcagttgtccaaagca

SEQ ID NO: 115 - DNA, 20 bp, artificial
  human GFAT antisense
gcgctgggggtggctattga

SEQ ID NO: 116 - DNA, 20 bp, artificial
  human GFAT antisense
cgggctcgggggccggggtg

SEQ ID NO: 117 - DNA, 20 bp, artificial
  human GFAT antisense
tcggtgggcaatctgcgggc

SEQ ID NO: 118 - DNA, 20 bp, artificial
  human GFAT antisense
tctgtttcagattcgaagtc

SEQ ID NO: 119 - DNA, 20 bp, artificial
  human GFAT antisense
atcaaagttgactcttcctc

SEQ ID NO: 120 - DNA, 20 bp, artificial
  human GFAT antisense
gtccaaagcagcttgaattt

SEQ ID NO: 121 - DNA, 20 bp, artificial
  human GFAT antisense
gatttctcgtctcgttcgag

SEQ ID NO: 122 - DNA, 20 bp, artificial
  human GFAT antisense
ggatttctcgtctcgttcga

SEQ ID NO: 123 - DNA, 20 bp, artificial
  human GFAT antisense
ggtgatgattccattgtgaa

SEQ ID NO: 124 - DNA, 20 bp, artificial
  human GFAT antisense
tcgaagtcatagcctttgct

SEQ ID NO: 125 - DNA, 20 bp, artificial
  human GFAT antisense
ttctccatgtgttgcccaac

SEQ ID NO: 126 - DNA, 20 bp, artificial
  human GFAT antisense
atcagagcgctgggggtggc

SEQ ID NO: 127 - DNA, 20 bp, artificial
  human GFAT antisense
ttccaccgggaaaaggcagg

SEQ ID NO: 128 - DNA, 20 bp, artificial
  human GFAT antisense
tggagttccatctggagtgt

SEQ ID NO: 129 - DNA, 20 bp, artificial
  human GFAT antisense
tcatcaaagttgactcttcc

SEQ ID NO: 130 - DNA, 20 bp, artificial
  human GFAT antisense
aagtcacttgctagttccac

SEQ ID NO: 131 - DNA, 20 bp, artificial
  human GFAT antisense
gcctttgtactggccacacc

SEQ ID NO: 132 - DNA, 20 bp, artificial
  human GFAT antisense
tgtccaaagcagcttgaatt

SEQ ID NO: 133 - DNA, 20 bp, artificial
  human GFAT antisense
ttgtccaaagcagcttgaat

SEQ ID NO: 134 - DNA, 20 bp, artificial
  human GFAT antisense
atttttatcagagcgctggg

SEQ ID NO: 135 - DNA, 20 bp, artificial
  human GFAT antisense
ttcgaagtcatagcctttgc

SEQ ID NO: 136 - DNA, 20 bp, artificial
  human GFAT antisense
tcttccaccgggaaaaggca

SEQ ID NO: 137 - DNA, 20 bp, artificial
  human GFAT antisense
tgcccttcatgatctgctgg

SEQ ID NO: 138 - DNA, 20 bp, artificial
  human GFAT antisense
ggcccgcgaggccaggggcg

SEQ ID NO: 139 - DNA, 20 bp, artificial
  human GFAT antisense
atttctcgtctcgttcgagg

SEQ ID NO: 140 - DNA, 20 bp, artificial
  human GFAT antisense
ggtatgagctattccaaggt

SEQ ID NO: 141 - DNA, 20 bp, artificial
  human GFAT antisense
tctccatgtgttgcccaacg

SEQ ID NO: 142 - DNA, 20 bp, artificial
  human GFAT antisense
agagggctacctcgccttgt

SEQ ID NO: 143 - DNA, 20 bp, artificial
  human GFAT antisense
ctgctttttcttccaccggg

SEQ ID NO: 144 - DNA, 20 bp, artificial
  human GFAT antisense
tcacacatcataagggcaaa

SEQ ID NO: 145 - DNA, 20 bp, artificial
  human GFAT antisense
atcatcacacatcataaggg

SEQ ID NO: 146 - DNA, 20 bp, artificial
  human GFAT antisense
taatttctttgattttcagt

SEQ ID NO: 147 - DNA, 20 bp, artificial
  human GFAT antisense
gtaatttctttgattttcag

SEQ ID NO: 148 - DNA, 20 bp, artificial
  human GFAT antisense
agtaatttctttgattttca

SEQ ID NO: 149 - DNA, 20 bp, artificial
  human GFAT antisense
gcttgtgaacttcttcatcc

SEQ ID NO: 150 - DNA, 20 bp, artificial
  human GFAT antisense
ttctttgattttcagtgccc

SEQ ID NO: 151 - DNA, 20 bp, artificial
  human GFAT antisense
aaaaaggcttcaaggggtga

SEQ ID NO: 152 - DNA, 20 bp, artificial
  human GFAT antisense
ttctcgtctcgttcgaggaa

SEQ ID NO: 153 - DNA, 20 bp, artificial
  human GFAT antisense
gtagttggtgatgattccat

SEQ ID NO: 154 - DNA, 20 bp, artificial
  human GFAT antisense
cgaagtcatagcctttgctt

SEQ ID NO: 155 - DNA, 20 bp, artificial
  human GFAT antisense
ggagttccatctggagtgtt

SEQ ID NO: 156 - DNA, 20 bp, artificial
  human GFAT antisense
gttcttaatggtctcagtat

SEQ ID NO: 157 - DNA, 20 bp, artificial
  human GFAT antisense
gttgcttaatcatacagttt

SEQ ID NO: 158 - DNA, 20 bp, artificial
  human GFAT antisense
tgtgaacttcttcatccagt

SEQ ID NO: 159 - DNA, 20 bp, artificial
  human GFAT antisense
cttccaccgggaaaaggcag

SEQ ID NO: 160 - DNA, 20 bp, artificial
  human GFAT antisense
gactcttcctctcattgtgt

SEQ ID NO: 161 - DNA, 20 bp, artificial
  human GFAT antisense
gtactggccacaccaatctc

SEQ ID NO: 162 - DNA, 20 bp, artificial
  human GFAT antisense
gatccgatcatcacacatca

SEQ ID NO: 163 - DNA, 20 bp, artificial
  human GFAT antisense
ccttccctaactgtccaagt

SEQ ID NO: 164 - DNA, 20 bp, artificial
  human GFAT antisense
gttgcccttcatgatctgct

SEQ ID NO: 165 - DNA, 20 bp, artificial
  human GFAT antisense
cctctcattgtgttcacgac

SEQ ID NO: 166 - DNA, 20 bp, artificial
  human GFAT antisense
tctttgattttcagtgcccc

SEQ ID NO: 167 - DNA, 20 bp, artificial
  human GFAT antisense
taaaaaaaggcttcaagggg

SEQ ID NO: 168 - DNA, 20 bp, artificial
  human GFAT antisense
tgaacttcttcatccagtgc

SEQ ID NO: 169 - DNA, 20 bp, artificial
  human GFAT antisense
gggtatgagctattccaagg

SEQ ID NO: 170 - DNA, 20 bp, artificial
  human GFAT antisense
tccatgtgttgcccaacggg

SEQ ID NO: 171 - DNA, 20 bp, artificial
  human GFAT antisense
agtcatagcctttgctttcc

SEQ ID NO: 172 - DNA, 20 bp, artificial
  human GFAT antisense
ttcttccaccgggaaaaggc

SEQ ID NO: 173 - DNA, 20 bp, artificial
  human GFAT antisense
tgtactggccacaccaatct

SEQ ID NO: 174 - DNA, 20 bp, artificial
  human GFAT antisense
tttctttgattttcagtgcc

SEQ ID NO: 175 - DNA, 20 bp, artificial
  human GFAT antisense
aggggtgatattttaaatca

SEQ ID NO: 176 - DNA, 20 bp, artificial
  human GFAT antisense
acactgccactggctttaga

SEQ ID NO: 177 - DNA, 20 bp, artificial
  human GFAT antisense
agcttgaatttaaagtttgt

SEQ ID NO: 178 - DNA, 20 bp, artificial
  human GFAT antisense
ctgcgggctcgggggccggg

SEQ ID NO: 179 - DNA, 20 bp, artificial
  human GFAT antisense
gttccatctggagtgtttgc

SEQ ID NO: 180 - DNA, 20 bp, artificial
  human GFAT antisense
ctgctggagttccatctgga

SEQ ID NO: 181 - DNA, 20 bp, artificial
  human GFAT antisense
ttcaaggggtgatattttaa

SEQ ID NO: 182 - DNA, 20 bp, artificial
  human GFAT antisense
ctaaaaaaaggcttcaaggg

SEQ ID NO: 183 - DNA, 20 bp, artificial
  human GFAT antisense
cggtgggcaatctgcgggct

SEQ ID NO: 184 - DNA, 20 bp, artificial
  human GFAT antisense
agccgtttcaatccaagcat

SEQ ID NO: 185 - DNA, 20 bp, artificial
  human GFAT antisense
gaagtcatagcctttgcttt

SEQ ID NO: 186 - DNA, 20 bp, artificial
  human GFAT antisense
atgatctgctggagttccat

SEQ ID NO: 187 - DNA, 20 bp, artificial
  human GFAT antisense
cctttgtactggccacacca

SEQ ID NO: 188 - DNA, 20 bp, artificial
  human GFAT antisense
tcaaggggtgatattttaaa

SEQ ID NO: 189 - DNA, 20 bp, artificial
  human GFAT antisense
gttgcccaacgggtatgagc

SEQ ID NO: 190 - DNA, 20 bp, artificial
  human GFAT antisense
ggttctccatgtgttgccca

SEQ ID NO: 191 - DNA, 20 bp, artificial
  human GFAT antisense
actgctttttcttccaccgg

SEQ ID NO: 192 - DNA, 20 bp, artificial
  human GFAT antisense
atctgctggagttccatctg

SEQ ID NO: 193 - DNA, 20 bp, artificial
  human GFAT antisense
ttgcttaatcatacagtttc

SEQ ID NO: 194 - DNA, 20 bp, artificial
  human GFAT antisense
tggtctgaatgaagtatggt

SEQ ID NO: 195 - DNA, 20 bp, artificial
  human GFAT antisense
cttccctaactgtccaagta

SEQ ID NO: 196 - DNA, 20 bp, artificial
  human GFAT antisense
acacggcccgcgaggccagg

SEQ ID NO: 197 - DNA, 20 bp, artificial
  human GFAT antisense
tcagagcgctgggggtggct

SEQ ID NO: 198 - DNA, 20 bp, artificial
  human GFAT antisense
aagtcatagcctttgctttc

SEQ ID NO: 199 - DNA, 20 bp, artificial
  human GFAT antisense
ctgtttcagattcgaagtca

SEQ ID NO: 200 - DNA, 20 bp, artificial
  human GFAT antisense
ggtatcttgactttcccgat

SEQ ID NO: 201 - DNA, 20 bp, artificial
  human GFAT antisense
cccttcatgatctgctggag

SEQ ID NO: 202 - DNA, 20 bp, artificial
  human GFAT antisense
caggaagtcacttgctagtt

SEQ ID NO: 203 - DNA, 20 bp, artificial
  human GFAT antisense
tccaggaagtcacttgctag

SEQ ID NO: 204 - DNA, 20 bp, artificial
  human GFAT antisense
gatcatcacacatcataagg

SEQ ID NO: 205 - DNA, 20 bp, artificial
  human GFAT antisense
tgttgcttaatcatacagtt

SEQ ID NO: 206 - DNA, 20 bp, artificial
  human GFAT antisense
gtatgagctattccaaggtg

SEQ ID NO: 207 - DNA, 20 bp, artificial
  human GFAT antisense
tgtcttgtgttgcttaatca

SEQ ID NO: 208 - DNA, 20 bp, artificial
  human GFAT antisense
tccaaagcagcttgaattta

SEQ ID NO: 209 - DNA, 20 bp, artificial
  human GFAT antisense
gtcagttgtccaaagcagct

SEQ ID NO: 210 - DNA, 20 bp, artificial
  human GFAT antisense
ttgcccaacgggtatgagct

SEQ ID NO: 211 - DNA, 20 bp, artificial
  human GFAT antisense
tgggttctccatgtgttgcc

SEQ ID NO: 212 - DNA, 20 bp, artificial
  human GFAT antisense
tgctttttcttccaccggga

SEQ ID NO: 213 - DNA, 20 bp, artificial
  human GFAT antisense
gatctcctttatgtgatcct

SEQ ID NO: 214 - DNA, 20 bp, artificial
  human GFAT antisense
caaggggtgatattttaaat

SEQ ID NO: 215 - DNA, 20 bp, artificial
  human GFAT antisense
gcgaggccaggggcgagtgg

SEQ ID NO: 216 - DNA, 20 bp, artificial
  human GFAT antisense
tctcgtctcgttcgaggaac

SEQ ID NO: 217 - DNA, 20 bp, artificial
  human GFAT antisense
ttgtgaacttcttcatccag

SEQ ID NO: 218 - DNA, 20 bp, artificial
  human GFAT antisense
gtcatcaaagttgactcttc

SEQ ID NO: 219 - DNA, 20 bp, artificial
  human GFAT antisense
tctggatctcctttatgtga

SEQ ID NO: 220 - DNA, 20 bp, artificial
  human GFAT antisense
aggaagtcacttgctagttc

SEQ ID NO: 221 - DNA, 20 bp, artificial
  human GFAT antisense
aagtaatttctttgattttc

SEQ ID NO: 222 - DNA, 20 bp, artificial
  human GFAT antisense
ctcagtatcctccttatcac

SEQ ID NO: 223 - DNA, 20 bp, artificial
  human GFAT antisense
ttccctaactgtccaagtat

SEQ ID NO: 224 - DNA, 20 bp, artificial
  human GFAT antisense
gttgcttgtgaacttcttca

SEQ ID NO: 225 - DNA, 20 bp, artificial
  human GFAT antisense
tgttgcttgtgaacttcttc

SEQ ID NO: 226 - DNA, 20 bp, artificial
  human GFAT antisense
ttgtactggccacaccaatc

SEQ ID NO: 227 - DNA, 20 bp, artificial
  human GFAT antisense
cgatcatcacacatcataag

SEQ ID NO: 228 - DNA, 20 bp, artificial
  human GFAT antisense
attttcagtgccccttcaag

SEQ ID NO: 229 - DNA, 20 bp, artificial
  human GFAT antisense
gtgttgcccaacgggtatga

SEQ ID NO: 230 - DNA, 20 bp, artificial
  human GFAT antisense
aaggggtgatattttaaatc

SEQ ID NO: 231 - DNA, 20 bp, artificial
  human GFAT antisense
agttttacagtttgatttaa

SEQ ID NO: 232 - DNA, 20 bp, artificial
  human GFAT antisense
aggcctttgattagggtctc

SEQ ID NO: 233 - DNA, 20 bp, artificial
  human GFAT antisense
gtcatagcctttgctttcca

SEQ ID NO: 234 - DNA, 20 bp, artificial
  human GFAT antisense
gtatcctccttatcacaaat

SEQ ID NO: 235 - DNA, 20 bp, artificial
  human GFAT antisense
agtatcctccttatcacaaa

SEQ ID NO: 236 - DNA, 20 bp, artificial
  human GFAT antisense
tgttcttaatggtctcagta

SEQ ID NO: 237 - DNA, 20 bp, artificial
  human GFAT antisense
actaaaaaaaggcttcaagg

SEQ ID NO: 238 - DNA, 20 bp, artificial
  human GFAT antisense
actctttcactggtctgaat

SEQ ID NO: 239 - DNA, 20 bp, artificial
  human GFAT antisense
ggcctttgattagggtctcc

SEQ ID NO: 240 - DNA, 20 bp, artificial
  human GFAT antisense
ttgttgcttgtgaacttctt

SEQ ID NO: 241 - DNA, 20 bp, artificial
  human GFAT antisense
gacaggactgggttctccat

SEQ ID NO: 242 - DNA, 20 bp, artificial
  human GFAT antisense
tgacaggactgggttctcca

SEQ ID NO: 243 - DNA, 20 bp, artificial
  human GFAT antisense
ctggatctcctttatgtgat

SEQ ID NO: 244 - DNA, 20 bp, artificial
  human GFAT antisense
ggggtgatattttaaatcaa

SEQ ID NO: 245 - DNA, 20 bp, artificial
  human GFAT antisense
gccggggtggcgccgacacg

SEQ ID NO: 246 - DNA, 20 bp, artificial
  human GFAT antisense
ttggtgatgattccattgtg

SEQ ID NO: 247 - DNA, 20 bp, artificial
  human GFAT antisense
ccttcatgatctgctggagt

SEQ ID NO: 248 - DNA, 20 bp, artificial
  human GFAT antisense
ctagttccaccatcacaggc

SEQ ID NO: 249 - DNA, 20 bp, artificial
  human GFAT antisense
gctagttccaccatcacagg

SEQ ID NO: 250 - DNA, 20 bp, artificial
  human GFAT antisense
gtgatgattccattgtgaat

SEQ ID NO: 251 - DNA, 20 bp, artificial
  human GFAT antisense
gggctacctcgccttgtgcc

SEQ ID NO: 252 - DNA, 20 bp, artificial
  human GFAT antisense
aatgaactgaagttgccctt

SEQ ID NO: 253 - DNA, 20 bp, artificial
  human GFAT antisense
cacacatcataagggcaaac

SEQ ID NO: 254 - DNA, 20 bp, artificial
  human GFAT antisense
cagccgtttcaatccaagca

SEQ ID NO: 255 - DNA, 20 bp, artificial
  human GFAT antisense
aatttctttgattttcagtg

SEQ ID NO: 256 - DNA, 20 bp, artificial
  human GFAT antisense
catattgtcagttgtccaaa

SEQ ID NO: 257 - DNA, 20 bp, artificial
  human GFAT antisense
ggtgggcaatctgcgggctc

SEQ ID NO: 258 - DNA, 20 bp, artificial
  human GFAT antisense
caacgggtatgagctattcc

SEQ ID NO: 259 - DNA, 20 bp, artificial
  human GFAT antisense
tgtctgtttcagattcgaag

SEQ ID NO: 260 - DNA, 20 bp, artificial
  human GFAT antisense
ggctacctcgccttgtgcca

SEQ ID NO: 261 - DNA, 20 bp, artificial
  human GFAT antisense
gagggctacctcgccttgtg

SEQ ID NO: 262 - DNA, 20 bp, artificial
  human GFAT antisense
ggatctcctttatgtgatcc

SEQ ID NO: 263 - DNA, 20 bp, artificial
  human GFAT antisense
cttgctagttccaccatcac

SEQ ID NO: 264 - DNA, 20 bp, artificial
  human GFAT antisense
tacactgccactggctttag

SEQ ID NO: 265 - DNA, 20 bp, artificial
  human GFAT antisense
atattgtcagttgtccaaag

SEQ ID NO: 266 - DNA, 20 bp, artificial
  human GFAT antisense
aggatttctcgtctcgttcg

SEQ ID NO: 267 - DNA, 20 bp, artificial
  human GFAT antisense
gtatcttgactttcccgatt

SEQ ID NO: 268 - DNA, 20 bp, artificial
  human GFAT antisense
tttcttccaccgggaaaagg

SEQ ID NO: 269 - DNA, 20 bp, artificial
  human GFAT antisense
taagtaatttctttgatttt

SEQ ID NO: 270 - DNA, 20 bp, artificial
  human GFAT antisense
atacaaaaggtgtcttgtgt

SEQ ID NO: 271 - DNA, 20 bp, artificial
  human GFAT antisense
ggatttactaaaaaaaggct

SEQ ID NO: 272 - DNA, 20 bp, artificial
  human GFAT antisense
catccagtgccttaactttt

SEQ ID NO: 273 - DNA, 20 bp, artificial
  human GFAT antisense
ccatgtgttgcccaacgggt

SEQ ID NO: 274 - DNA, 20 bp, artificial
  human GFAT antisense
gactgggttctccatgtgtt

SEQ ID NO: 275 - DNA, 20 bp, artificial
  human GFAT antisense
ttgtctctgtgtctgtttca

SEQ ID NO: 276 - DNA, 20 bp, artificial
  human GFAT antisense
ctggccacaccaatctcagg

SEQ ID NO: 277 - DNA, 20 bp, artificial
  human GFAT antisense
ataagtaatttctttgattt

SEQ ID NO: 278 - DNA, 20 bp, artificial
  human GFAT antisense
tacaaaaggtgtcttgtgtt

SEQ ID NO: 279 - DNA, 20 bp, artificial
  human GFAT antisense
tttactaaaaaaaggcttca

SEQ ID NO: 280 - DNA, 20 bp, artificial
  human GFAT antisense
actggtctgaatgaagtatg

SEQ ID NO: 281 - DNA, 20 bp, artificial
  human GFAT antisense
cactgccactggctttagat

SEQ ID NO: 282 - DNA, 20 bp, artificial
  human GFAT antisense
gttttacagtttgatttaaa

SEQ ID NO: 283 - DNA, 20 bp, artificial
  human GFAT antisense
ttcttcatccagtgccttaa

SEQ ID NO: 284 - DNA, 20 bp, artificial
  human GFAT antisense
acaggactgggttctccatg

SEQ ID NO: 285 - DNA, 20 bp, artificial
  human GFAT antisense
tgtagttggtgatgattcca

SEQ ID NO: 286 - DNA, 20 bp, artificial
  human GFAT antisense
tgtctctgtgtctgtttcag

SEQ ID NO: 287 - DNA, 20 bp, artificial
  human GFAT antisense
atgaactgaagttgcccttc

SEQ ID NO: 288 - DNA, 20 bp, artificial
  human GFAT antisense
tttgtgttcttaatggtctc

SEQ ID NO: 289 - DNA, 20 bp, artificial
  human GFAT antisense
gtcttgtgttgcttaatcat

SEQ ID NO: 290 - DNA, 20 bp, artificial
  human GFAT antisense
ttcggtgggcaatctgcggg

SEQ ID NO: 291 - DNA, 20 bp, artificial
  human GFAT antisense
ccggagacacggcccgcgag

SEQ ID NO: 292 - DNA, 20 bp, artificial
  human GFAT antisense
agttccatctggagtgtttg

SEQ ID NO: 293 - DNA, 20 bp, artificial
  human GFAT antisense
agtcatcaaagttgactctt

SEQ ID NO: 294 - DNA, 20 bp, artificial
  human GFAT antisense
agcctttgtactggccacac

SEQ ID NO: 295 - DNA, 20 bp, artificial
  human GFAT antisense
tgcttaatcatacagtttcg

SEQ ID NO: 296 - DNA, 20 bp, artificial
  human GFAT antisense
cttcaaggggtgatatttta

SEQ ID NO: 297 - DNA, 20 bp, artificial
  human GFAT antisense
ctctttcactggtctgaatg

SEQ ID NO: 298 - DNA, 20 bp, artificial
  human GFAT antisense
atccagtgccttaacttttc

SEQ ID NO: 299 - DNA, 20 bp, artificial
  human GFAT antisense
tgcttgtgaacttcttcatc

SEQ ID NO: 300 - DNA, 20 bp, artificial
  human GFAT antisense
aacgggtatgagctattcca

SEQ ID NO: 301 - DNA, 20 bp, artificial
  human GFAT antisense
ggactgggttctccatgtgt

SEQ ID NO: 302 - DNA, 20 bp, artificial
  human GFAT antisense
caccgggaaaaggcaggttg

SEQ ID NO: 303 - DNA, 20 bp, artificial
  human GFAT antisense
gaagttgcccttcatgatct

SEQ ID NO: 304 - DNA, 20 bp, artificial
  human GFAT antisense
ctcgtctcgttcgaggaaca

SEQ ID NO: 305 - DNA, 20 bp, artificial
  human GFAT antisense
tgttgcccaacgggtatgag

SEQ ID NO: 306 - DNA, 20 bp, artificial
  human GFAT antisense
ttgacaggactgggttctcc

SEQ ID NO: 307 - DNA, 20 bp, artificial
  human GFAT antisense
tatttttatcagagcgctgg

SEQ ID NO: 308 - DNA, 20 bp, artificial
  human GFAT antisense
ctggagttccatctggagtg

SEQ ID NO: 309 - DNA, 20 bp, artificial
  human GFAT antisense
tgaagttgcccttcatgatc

SEQ ID NO: 310 - DNA, 20 bp, artificial
  human GFAT antisense
tgaactgaagttgcccttca

SEQ ID NO: 311 - DNA, 20 bp, artificial
  human GFAT antisense
tactggccacaccaatctca

SEQ ID NO: 312 - DNA, 20 bp, artificial
  human GFAT antisense
tataagtaatttctttgatt

SEQ ID NO: 313 - DNA, 20 bp, artificial
  human GFAT antisense
ttttgtgttcttaatggtct

SEQ ID NO: 314 - DNA, 20 bp, artificial
  human GFAT antisense
cccttccctaactgtccaag

SEQ ID NO: 315 - DNA, 20 bp, artificial
  human GFAT antisense
gaaaacacaaagtagtagga

SEQ ID NO: 316 - DNA, 20 bp, artificial
  human GFAT antisense
cacggcccgcgaggccaggg

SEQ ID NO: 317 - DNA, 20 bp, artificial
  human GFAT antisense
ctttatcattgcctccatca

SEQ ID NO: 318 - DNA, 20 bp, artificial
  human GFAT antisense
cgctgggggtggctattgac

SEQ ID NO: 319 - DNA, 20 bp, artificial
  human GFAT antisense
gaactgaagttgcccttcat

SEQ ID NO: 320 - DNA, 20 bp, artificial
  human GFAT antisense
aaatgaactgaagttgccct

SEQ ID NO: 321 - DNA, 20 bp, artificial
  human GFAT antisense
gtccaggaagtcacttgcta

SEQ ID NO: 322 - DNA, 20 bp, artificial
  human GFAT antisense
tggccacaccaatctcagga

SEQ ID NO: 323 - DNA, 20 bp, artificial
  human GFAT antisense
atataagtaatttctttgat

SEQ ID NO: 324 - DNA, 20 bp, artificial
  human GFAT antisense
tatcctccttatcacaaatt

SEQ ID NO: 325 - DNA, 20 bp, artificial
  human GFAT antisense
tcatattgtcagttgtccaa

SEQ ID NO: 326 - DNA, 20 bp, artificial
  human GFAT antisense
gtgaacttcttcatccagtg

SEQ ID NO: 327 - DNA, 20 bp, artificial
  human GFAT antisense
ttgcttgtgaacttcttcat

SEQ ID NO: 328 - DNA, 20 bp, artificial
  human GFAT antisense
cgggtatgagctattccaag

SEQ ID NO: 329 - DNA, 20 bp, artificial
  human GFAT antisense
tctgctggagttccatctgg

SEQ ID NO: 330 - DNA, 20 bp, artificial
  human GFAT antisense
tctttcactggtctgaatga

SEQ ID NO: 331 - DNA, 20 bp, artificial
  human GFAT antisense
catacactgccactggcttt

SEQ ID NO: 332 - DNA, 20 bp, artificial
  human GFAT antisense
gagcatacactgccactggc

SEQ ID NO: 333 - DNA, 20 bp, artificial
  human GFAT antisense
aaacacaaagtagtaggata

SEQ ID NO: 334 - DNA, 20 bp, artificial
  human GFAT antisense
cttcatccagtgccttaact

SEQ ID NO: 335 - DNA, 20 bp, artificial
  human GFAT antisense
acacatcataagggcaaaca

SEQ ID NO: 336 - DNA, 20 bp, artificial
  human GFAT antisense
ctttttgtgttcttaatggt

SEQ ID NO: 337 - DNA, 20 bp, artificial
  human GFAT antisense
gtgatattttaaatcaaggt

SEQ ID NO: 338 - DNA, 20 bp, artificial
  human GFAT antisense
ggtgatattttaaatcaagg

SEQ ID NO: 339 - DNA, 20 bp, artificial
  human GFAT antisense
gggtgatattttaaatcaag

SEQ ID NO: 340 - DNA, 20 bp, artificial
  human GFAT antisense
atttactaaaaaaaggcttc

SEQ ID NO: 341 - DNA, 20 bp, artificial
  human GFAT antisense
atacactgccactggcttta

SEQ ID NO: 342 - DNA, 20 bp, artificial
  human GFAT antisense
tatcctctgtactccagtct

SEQ ID NO: 343 - DNA, 20 bp, artificial
  human GFAT antisense
cttgtgaacttcttcatcca

SEQ ID NO: 344 - DNA, 20 bp, artificial
  human GFAT antisense
gtctctgtgtctgtttcaga

SEQ ID NO: 345 - DNA, 20 bp, artificial
  human GFAT antisense
tctctccaccaaggtagtaa

SEQ ID NO: 346 - DNA, 20 bp, artificial
  human GFAT antisense
accgggaaaaggcaggttgt

SEQ ID NO: 347 - DNA, 20 bp, artificial
  human GFAT antisense
ttttcttccaccgggaaaag

SEQ ID NO: 348 - DNA, 20 bp, artificial
  human GFAT antisense
acgcgattggtgtgttctat

SEQ ID NO: 349 - DNA, 20 bp, artificial
  human GFAT antisense
tagtcatcaaagttgactct

SEQ ID NO: 350 - DNA, 20 bp, artificial
  human GFAT antisense
ccaccatcacaggcaactca

SEQ ID NO: 351 - DNA, 20 bp, artificial
  human GFAT antisense
tgctagttccaccatcacag

SEQ ID NO: 352 - DNA, 20 bp, artificial
  human GFAT antisense
gtgttcttaatggtctcagt

SEQ ID NO: 353 - DNA, 20 bp, artificial
  human GFAT antisense
gatattttaaatcaaggttt

SEQ ID NO: 354 - DNA, 20 bp, artificial
  human GFAT antisense
ttactaaaaaaaggcttcaa

SEQ ID NO: 355 - DNA, 20 bp, artificial
  human GFAT antisense
aggatttactaaaaaaaggc

SEQ ID NO: 356 - DNA, 20 bp, artificial
  human GFAT antisense
gccggagacacggcccgcga

SEQ ID NO: 357 - DNA, 20 bp, artificial
  human GFAT antisense
attcgaagtcatagcctttg

SEQ ID NO: 358 - DNA, 20 bp, artificial
  human GFAT antisense
ctgtgtctgtttcagattcg

SEQ ID NO: 359 - DNA, 20 bp, artificial
  human GFAT antisense
tttttcttccaccgggaaaa

SEQ ID NO: 360 - DNA, 20 bp, artificial
  human GFAT antisense
gagttccatctggagtgttt

SEQ ID NO: 361 - DNA, 20 bp, artificial
  human GFAT antisense
tggatctcctttatgtgatc

SEQ ID NO: 362 - DNA, 20 bp, artificial
  human GFAT antisense
ctgtccaggaagtcacttgc

SEQ ID NO: 363 - DNA, 20 bp, artificial
  human GFAT antisense
gcatataagtaatttctttg

SEQ ID NO: 364 - DNA, 20 bp, artificial
  human GFAT antisense
tactaaaaaaaggcttcaag

SEQ ID NO: 365 - DNA, 20 bp, artificial
  human GFAT antisense
ccactggctttagatactcc

SEQ ID NO: 366 - DNA, 20 bp, artificial
  human GFAT antisense
atcatattgtcagttgtcca

SEQ ID NO: 367 - DNA, 20 bp, artificial
  human GFAT antisense
ctttgtagttggtgatgatt

SEQ ID NO: 368 - DNA, 20 bp, artificial
  human GFAT antisense
tgtttcagattcgaagtcat

SEQ ID NO: 369 - DNA, 20 bp, artificial
  human GFAT antisense
ttcctttcttgtctttgcct

SEQ ID NO: 370 - DNA, 20 bp, artificial
  human GFAT antisense
cttcctttcttgtctttgcc

SEQ ID NO: 371 - DNA, 20 bp, artificial
  human GFAT antisense
catgatctgctggagttcca

SEQ ID NO: 372 - DNA, 20 bp, artificial
  human GFAT antisense
agtgccccttcaagacaagt

SEQ ID NO: 373 - DNA, 20 bp, artificial
  human GFAT antisense
ttttcagtgccccttcaaga

SEQ ID NO: 374 - DNA, 20 bp, artificial
  human GFAT antisense
cttggcataagtgtgatctc

SEQ ID NO: 375 - DNA, 20 bp, artificial
  human GFAT antisense
gcttgaatttaaagtttgtg

SEQ ID NO: 376 - DNA, 20 bp, artificial
  human GFAT antisense
aaaacacaaagtagtaggat

SEQ ID NO: 377 - DNA, 20 bp, artificial
  human GFAT antisense
tgaaaacacaaagtagtagg

SEQ ID NO: 378 - DNA, 20 bp, artificial
  human GFAT antisense
tttatcattgcctccatcaa

SEQ ID NO: 379 - DNA, 20 bp, artificial
  human GFAT antisense
tattccaaggtgtacatcaa

SEQ ID NO: 380 - DNA, 20 bp, artificial
  human GFAT antisense
cagagggctacctcgccttg

SEQ ID NO: 381 - DNA, 20 bp, artificial
  human GFAT antisense
ctctggatctcctttatgtg

SEQ ID NO: 382 - DNA, 20 bp, artificial
  human GFAT antisense
aagcctttgtactggccaca

SEQ ID NO: 383 - DNA, 20 bp, artificial
  human GFAT antisense
tcagtatcctccttatcaca

SEQ ID NO: 384 - DNA, 20 bp, artificial
  human GFAT antisense
aatacaaaaggtgtcttgtg

SEQ ID NO: 385 - DNA, 20 bp, artificial
  human GFAT antisense
tttaatagcagctctgtgtt

SEQ ID NO: 386 - DNA, 20 bp, artificial
  human GFAT antisense
tcattatttttatcagagcg

SEQ ID NO: 387 - DNA, 20 bp, artificial
  human GFAT antisense
cagattcgaagtcatagcct

SEQ ID NO: 388 - DNA, 20 bp, artificial
  human GFAT antisense
gccgtttcaatccaagcatg

SEQ ID NO: 389 - DNA, 20 bp, artificial
  human GFAT antisense
tttttgtgttcttaatggtc

SEQ ID NO: 390 - DNA, 20 bp, artificial
  human GFAT antisense
aaatacaaaaggtgtcttgt

SEQ ID NO: 391 - DNA, 20 bp, artificial
  human GFAT antisense
gatttactaaaaaaaggctt

SEQ ID NO: 392 - DNA, 20 bp, artificial
  human GFAT antisense
aagttttacagtttgattta

SEQ ID NO: 393 - DNA, 20 bp, artificial
  human GFAT antisense
ttaatagcagctctgtgttg

SEQ ID NO: 394 - DNA, 20 bp, artificial
  human GFAT antisense
atttaatagcagctctgtgt

SEQ ID NO: 395 - DNA, 20 bp, artificial
  human GFAT antisense
cctttgattagggtctccag

SEQ ID NO: 396 - DNA, 20 bp, artificial
  human GFAT antisense
aaggcctttgattagggtct

SEQ ID NO: 397 - DNA, 20 bp, artificial
  human GFAT antisense
attgtctctgtgtctgtttc

SEQ ID NO: 398 - DNA, 20 bp, artificial
  human GFAT antisense
gagagagattgcagcttcct

SEQ ID NO: 399 - DNA, 20 bp, artificial
  human GFAT antisense
atctcctttatgtgatcctt

SEQ ID NO: 400 - DNA, 20 bp, artificial
  human GFAT antisense
gtgccccttcaagacaagta

SEQ ID NO: 401 - DNA, 20 bp, artificial
  human GFAT antisense
actgtaaagggatcacgctg

SEQ ID NO: 402 - DNA, 20 bp, artificial
  human GFAT antisense
gcttaatcatacagtttcgt

SEQ ID NO: 403 - DNA, 20 bp, artificial
  human GFAT antisense
atattttaaatcaaggtttt

SEQ ID NO: 404 - DNA, 20 bp, artificial
  human GFAT antisense
tgtccaagtatgagcataca

SEQ ID NO: 405 - DNA, 20 bp, artificial
  human GFAT antisense
agatgaaaacacaaagtagt

SEQ ID NO: 406 - DNA, 20 bp, artificial
  human GFAT antisense
gggcaatctgcgggctcggg

SEQ ID NO: 407 - DNA, 20 bp, artificial
  human GFAT antisense
atatttccttctgcataaat

SEQ ID NO: 408 - DNA, 20 bp, artificial
  human GFAT antisense
tttgtactggccacaccaat

SEQ ID NO: 409 - DNA, 20 bp, artificial
  human GFAT antisense
cgttctttttgtgttcttaa

SEQ ID NO: 410 - DNA, 20 bp, artificial
  human GFAT antisense
tattgtcagttgtccaaagc

SEQ ID NO: 411 - DNA, 20 bp, artificial
  human GFAT antisense
ttcatccagtgccttaactt

SEQ ID NO: 412 - DNA, 20 bp, artificial
  human GFAT antisense
ttccaaggtgtacatcaaat

SEQ ID NO: 413 - DNA, 20 bp, artificial
  human GFAT antisense
attccaaggtgtacatcaaa

SEQ ID NO: 414 - DNA, 20 bp, artificial
  human GFAT antisense
gtgtctgtttcagattcgaa

SEQ ID NO: 415 - DNA, 20 bp, artificial
  human GFAT antisense
cctttcttgtctttgcctgt

SEQ ID NO: 416 - DNA, 20 bp, artificial
  human GFAT antisense
cgcgattggtgtgttctatg

SEQ ID NO: 417 - DNA, 20 bp, artificial
  human GFAT antisense
gctggagttccatctggagt

SEQ ID NO: 418 - DNA, 20 bp, artificial
  human GFAT antisense
cttcatgatctgctggagtt

SEQ ID NO: 419 - DNA, 20 bp, artificial
  human GFAT antisense
actgaagttgcccttcatga

SEQ ID NO: 420 - DNA, 20 bp, artificial
  human GFAT antisense
cagtgccccttcaagacaag

SEQ ID NO: 421 - DNA, 20 bp, artificial
  human GFAT antisense
tctttttgtgttcttaatgg

SEQ ID NO: 422 - DNA, 20 bp, artificial
  human GFAT antisense
tgatattttaaatcaaggtt

SEQ ID NO: 423 - DNA, 20 bp, artificial
  human GFAT antisense
tactctttcactggtctgaa

SEQ ID NO: 424 - DNA, 20 bp, artificial
  human GFAT antisense
cagcttgaatttaaagtttg

SEQ ID NO: 425 - DNA, 20 bp, artificial
  human GFAT antisense
ctctcattgtgttcacgaca

SEQ ID NO: 426 - DNA, 20 bp, artificial
  human GFAT antisense
ttgctagttccaccatcaca

SEQ ID NO: 427 - DNA, 20 bp, artificial
  human GFAT antisense
accacaggccgcccctgccg

SEQ ID NO: 428 - DNA, 20 bp, artificial
  human GFAT antisense
tattttaaatcaaggtttta

SEQ ID NO: 429 - DNA, 20 bp, artificial
  human GFAT antisense
acaaattactgggaaaatgt

SEQ ID NO: 430 - DNA, 20 bp, artificial
  human GFAT antisense
gatgaaaacacaaagtagta

SEQ ID NO: 431 - DNA, 20 bp, artificial
  human GFAT antisense
tcagattcgaagtcatagcc

SEQ ID NO: 432 - DNA, 20 bp, artificial
  human GFAT antisense
aactctctccaccaaggtag

SEQ ID NO: 433 - DNA, 20 bp, artificial
  human GFAT antisense
agggctacctcgccttgtgc

SEQ ID NO: 434 - DNA, 20 bp, artificial
  human GFAT antisense
gagagattgcagcttccttt

SEQ ID NO: 435 - DNA, 20 bp, artificial
  human GFAT antisense
tcatgatctgctggagttcc

SEQ ID NO: 436 - DNA, 20 bp, artificial
  human GFAT antisense
taaatgaactgaagttgccc

SEQ ID NO: 437 - DNA, 20 bp, artificial
  human GFAT antisense
atagtcatcaaagttgactc

SEQ ID NO: 438 - DNA, 20 bp, artificial
  human GFAT antisense
tgatcgttctttttgtgttc

SEQ ID NO: 439 - DNA, 20 bp, artificial
  human GFAT antisense
ctgtaaagggatcacgctga

SEQ ID NO: 440 - DNA, 20 bp, artificial
  human GFAT antisense
gattagggtctccaggattt

SEQ ID NO: 441 - DNA, 20 bp, artificial
  human GFAT antisense
atcctctgtactccagtctc

SEQ ID NO: 442 - DNA, 20 bp, artificial
  human GFAT antisense
ccagtgccttaacttttcct

SEQ ID NO: 443 - DNA, 20 bp, artificial
  human GFAT antisense
ccaacgggtatgagctattc

SEQ ID NO: 444 - DNA, 20 bp, artificial
  human GFAT antisense
gttctccatgtgttgcccaa

SEQ ID NO: 445 - DNA, 20 bp, artificial
  human GFAT antisense
tctgtgtctgtttcagattc

SEQ ID NO: 446 - DNA, 20 bp, artificial
  human GFAT antisense
tcttgactttcccgattgtc

SEQ ID NO: 447 - DNA, 20 bp, artificial
  human GFAT antisense
agagagattgcagcttcctt

SEQ ID NO: 448 - DNA, 20 bp, artificial
  human GFAT antisense
cgtccggggtgatctcctgc

SEQ ID NO: 449 - DNA, 20 bp, artificial
  human GFAT antisense
tagttccaccatcacaggca

SEQ ID NO: 450 - DNA, 20 bp, artificial
  human GFAT antisense
tgtccaggaagtcacttgct

SEQ ID NO: 451 - DNA, 20 bp, artificial
  human GFAT antisense
ccccttcaagacaagtagca

SEQ ID NO: 452 - DNA, 20 bp, artificial
  human GFAT antisense
ttggcataagtgtgatctct

SEQ ID NO: 453 - DNA, 20 bp, artificial
  human GFAT antisense
taccacaggccgcccctgcc

SEQ ID NO: 454 - DNA, 20 bp, artificial
  human GFAT antisense
ggtctgaatgaagtatggtg

SEQ ID NO: 455 - DNA, 20 bp, artificial
  human GFAT antisense
atcaatattaatttaatagc

SEQ ID NO: 456 - DNA, 20 bp, artificial
  human GFAT antisense
tgccggagacacggcccgcg

SEQ ID NO: 457 - DNA, 20 bp, artificial
  human GFAT antisense
cttgttgcttgtgaacttct

SEQ ID NO: 458 - DNA, 20 bp, artificial
  human GFAT antisense
ttcattatttttatcagagc

SEQ ID NO: 459 - DNA, 20 bp, artificial
  human GFAT antisense
aaagacgtccatccactact

SEQ ID NO: 460 - DNA, 20 bp, artificial
  human GFAT antisense
ggttttaaatacaaaaggtg

SEQ ID NO: 461 - DNA, 20 bp, artificial
  human GFAT antisense
aggttttaaatacaaaaggt

SEQ ID NO: 462 - DNA, 20 bp, artificial
  human GFAT antisense
ctactctttcactggtctga

SEQ ID NO: 463 - DNA, 20 bp, artificial
  human GFAT antisense
actgccactggctttagata

SEQ ID NO: 464 - DNA, 20 bp, artificial
  human GFAT antisense
ttttacagtttgatttaaaa

SEQ ID NO: 465 - DNA, 20 bp, artificial
  human GFAT antisense
gtctccaggatttctcgtct

SEQ ID NO: 466 - DNA, 20 bp, artificial
  human GFAT antisense
aggactgggttctccatgtg

SEQ ID NO: 467 - DNA, 20 bp, artificial
  human GFAT antisense
taactctctccaccaaggta

SEQ ID NO: 468 - DNA, 20 bp, artificial
  human GFAT antisense
ccggggtgatctcctgcagt

SEQ ID NO: 469 - DNA, 20 bp, artificial
  human GFAT antisense
aagttgcccttcatgatctg

SEQ ID NO: 470 - DNA, 20 bp, artificial
  human GFAT antisense
atttccttctgcataaatga

SEQ ID NO: 471 - DNA, 20 bp, artificial
  human GFAT antisense
tgatagcctcgtcccattat

SEQ ID NO: 472 - DNA, 20 bp, artificial
  human GFAT antisense
atgatagcctcgtcccatta

SEQ ID NO: 473 - DNA, 20 bp, artificial
  human GFAT antisense
catataagtaatttctttga

SEQ ID NO: 474 - DNA, 20 bp, artificial
  human GFAT antisense
acaaaaatcacatattgagt

SEQ ID NO: 475 - DNA, 20 bp, artificial
  human GFAT antisense
gcatacactgccactggctt

SEQ ID NO: 476 - DNA, 20 bp, artificial
  human GFAT antisense
taagttttacagtttgattt

SEQ ID NO: 477 - DNA, 20 bp, artificial
  human GFAT antisense
agcagcttgaatttaaagtt

SEQ ID NO: 478 - DNA, 20 bp, artificial
  human GFAT antisense
tagtaggatacccaacatgt

SEQ ID NO: 479 - DNA, 20 bp, artificial
  human GFAT antisense
ccaggatttctcgtctcgtt

SEQ ID NO: 480 - DNA, 20 bp, artificial
  human GFAT antisense
ctttgattagggtctccagg

SEQ ID NO: 481 - DNA, 20 bp, artificial
  human GFAT antisense
atatcctctgtactccagtc

SEQ ID NO: 482 - DNA, 20 bp, artificial
  human GFAT antisense
cactgctttttcttccaccg

SEQ ID NO: 483 - DNA, 20 bp, artificial
  human GFAT antisense
atctctggatctcctttatg

SEQ ID NO: 484 - DNA, 20 bp, artificial
  human GFAT antisense
ctgtgtttgtgatccccaca

SEQ ID NO: 485 - DNA, 20 bp, artificial
  human GFAT antisense
taagcctttgtactggccac

SEQ ID NO: 486 - DNA, 20 bp, artificial
  human GFAT antisense
cacatcataagggcaaacat

SEQ ID NO: 487 - DNA, 20 bp, artificial
  human GFAT antisense
cccttcaagacaagtagcat

SEQ ID NO: 488 - DNA, 20 bp, artificial
  human GFAT antisense
caaattactgggaaaatgta

SEQ ID NO: 489 - DNA, 20 bp, artificial
  human GFAT antisense
caggatttctcgtctcgttc

SEQ ID NO: 490 - DNA, 20 bp, artificial
  human GFAT antisense
tctttgtagttggtgatgat

SEQ ID NO: 491 - DNA, 20 bp, artificial
  human GFAT antisense
actttcccgattgtcataca

SEQ ID NO: 492 - DNA, 20 bp, artificial
  human GFAT antisense
cttgactttcccgattgtca

SEQ ID NO: 493 - DNA, 20 bp, artificial
  human GFAT antisense
gaaagacgtccatccactac

SEQ ID NO: 494 - DNA, 20 bp, artificial
  human GFAT antisense
gtccggggtgatctcctgca

SEQ ID NO: 495 - DNA, 20 bp, artificial
  human GFAT antisense
tatagtcatcaaagttgact

SEQ ID NO: 496 - DNA, 20 bp, artificial
  human GFAT antisense
tgtgtttctgtccaggaagt

SEQ ID NO: 497 - DNA, 20 bp, artificial
  human GFAT antisense
ggccacaccaatctcaggac

SEQ ID NO: 498 - DNA, 20 bp, artificial
  human GFAT antisense
acttggcataagtgtgatct

SEQ ID NO: 499 - DNA, 20 bp, artificial
  human GFAT antisense
atcctccttatcacaaatta

SEQ ID NO: 500 - DNA, 20 bp, artificial
  human GFAT antisense
gttctttttgtgttcttaat

SEQ ID NO: 501 - DNA, 20 bp, artificial
  human GFAT antisense
caactgtaaagggatcacgc

SEQ ID NO: 502 - DNA, 20 bp, artificial
  human GFAT antisense
gcaactgtaaagggatcacg

SEQ ID NO: 503 - DNA, 20 bp, artificial
  human GFAT antisense
gtgttgcttaatcatacagt

SEQ ID NO: 504 - DNA, 20 bp, artificial
  human GFAT antisense
caaaaatcacatattgagtg

SEQ ID NO: 505 - DNA, 20 bp, artificial
  human GFAT antisense
cactggctttagatactcca

SEQ ID NO: 506 - DNA, 20 bp, artificial
  human GFAT antisense
atgaaaacacaaagtagtag

SEQ ID NO: 507 - DNA, 20 bp, artificial
  human GFAT antisense
tctgcgggctcgggggccgg

SEQ ID NO: 508 - DNA, 20 bp, artificial
  human GFAT antisense
aatctgcgggctcgggggcc

SEQ ID NO: 509 - DNA, 20 bp, artificial
  human GFAT antisense
tcgtctcgttcgaggaacat

SEQ ID NO: 510 - DNA, 20 bp, artificial
  human GFAT antisense
gcctttgattagggtctcca

SEQ ID NO: 511 - DNA, 20 bp, artificial
  human GFAT antisense
tgcctccatcaaatcccaca

SEQ ID NO: 512 - DNA, 20 bp, artificial
  human GFAT antisense
tccaaggtgtacatcaaatt

SEQ ID NO: 513 - DNA, 20 bp, artificial
  human GFAT antisense
agctattccaaggtgtacat

SEQ ID NO: 514 - DNA, 20 bp, artificial
  human GFAT antisense
cccaacgggtatgagctatt

SEQ ID NO: 515 - DNA, 20 bp, artificial
  human GFAT antisense
ccactgctttttcttccacc

SEQ ID NO: 516 - DNA, 20 bp, artificial
  human GFAT antisense
tcaaatatttccttctgcat

SEQ ID NO: 517 - DNA, 20 bp, artificial
  human GFAT antisense
actggccacaccaatctcag

SEQ ID NO: 518 - DNA, 20 bp, artificial
  human GFAT antisense
ataagcctttgtactggcca

SEQ ID NO: 519 - DNA, 20 bp, artificial
  human GFAT antisense
agatccgatcatcacacatc

SEQ ID NO: 520 - DNA, 20 bp, artificial
  human GFAT antisense
gatagcctcgtcccattatc

SEQ ID NO: 521 - DNA, 20 bp, artificial
  human GFAT antisense
ttgtgttgcttaatcataca

SEQ ID NO: 522 - DNA, 20 bp, artificial
  human GFAT antisense
ctccaggatttctcgtctcg

SEQ ID NO: 523 - DNA, 20 bp, artificial
  human GFAT antisense
ggtctccaggatttctcgtc

SEQ ID NO: 524 - DNA, 20 bp, artificial
  human GFAT antisense
tttgattagggtctccagga

SEQ ID NO: 525 - DNA, 20 bp, artificial
  human GFAT antisense
tcatccagtgccttaacttt

SEQ ID NO: 526 - DNA, 20 bp, artificial
  human GFAT antisense
gattccattgtgaataacga

SEQ ID NO: 527 - DNA, 20 bp, artificial
  human GFAT antisense
tgtgtctgtttcagattcga

SEQ ID NO: 528 - DNA, 20 bp, artificial
  human GFAT antisense
ccaccaaggtagtaaagctg

SEQ ID NO: 529 - DNA, 20 bp, artificial
  human GFAT antisense
ctctccaccaaggtagtaaa

SEQ ID NO: 530 - DNA, 20 bp, artificial
  human GFAT antisense
gctacctcgccttgtgccaa

SEQ ID NO: 531 - DNA, 20 bp, artificial
  human GFAT antisense
gcgattggtgtgttctatga

SEQ ID NO: 532 - DNA, 20 bp, artificial
  human GFAT antisense
aatgatagcctcgtcccatt

SEQ ID NO: 533 - DNA, 20 bp, artificial
  human GFAT antisense
gtgtgatctctcatgatgat

SEQ ID NO: 534 - DNA, 20 bp, artificial
  human GFAT antisense
agtgtgatctctcatgatga

SEQ ID NO: 535 - DNA, 20 bp, artificial
  human GFAT antisense
gttttaaatacaaaaggtgt

SEQ ID NO: 536 - DNA, 20 bp, artificial
  human GFAT antisense
attttaaatcaaggttttaa

SEQ ID NO: 537 - DNA, 20 bp, artificial
  human GFAT antisense
cactggtctgaatgaagtat

SEQ ID NO: 538 - DNA, 20 bp, artificial
  human GFAT antisense
tgagcatacactgccactgg

SEQ ID NO: 539 - DNA, 20 bp, artificial
  human GFAT antisense
tccaagtatgagcatacact

SEQ ID NO: 540 - DNA, 20 bp, artificial
  human GFAT antisense
caaagtagtaggatacccaa

SEQ ID NO: 541 - DNA, 20 bp, artificial
  human GFAT antisense
aacacaaagtagtaggatac

SEQ ID NO: 542 - DNA, 20 bp, artificial
  human GFAT antisense
tgattagggtctccaggatt

SEQ ID NO: 543 - DNA, 20 bp, artificial
  human GFAT antisense
ttgattagggtctccaggat

SEQ ID NO: 544 - DNA, 20 bp, artificial
  human GFAT antisense
tcatatcctctgtactccag

SEQ ID NO: 545 - DNA, 20 bp, artificial
  human GFAT antisense
ttgcctccatcaaatcccac

SEQ ID NO: 546 - DNA, 20 bp, artificial
  human GFAT antisense
gagctattccaaggtgtaca

SEQ ID NO: 547 - DNA, 20 bp, artificial
  human GFAT antisense
gggtggctattgacaggact

SEQ ID NO: 548 - DNA, 20 bp, artificial
  human GFAT antisense
tgatgattccattgtgaata

SEQ ID NO: 549 - DNA, 20 bp, artificial
  human GFAT antisense
tcatagcctttgctttccaa

SEQ ID NO: 550 - DNA, 20 bp, artificial
  human GFAT antisense
tccaccaaggtagtaaagct

SEQ ID NO: 551 - DNA, 20 bp, artificial
  human GFAT antisense
ctctctccaccaaggtagta

SEQ ID NO: 552 - DNA, 20 bp, artificial
  human GFAT antisense
ggggtgatctcctgcagttc

SEQ ID NO: 553 - DNA, 20 bp, artificial
  human GFAT antisense
tccttctgcataaatgaact

SEQ ID NO: 554 - DNA, 20 bp, artificial
  human GFAT antisense
tcatgatcacaggcatcaat

SEQ ID NO: 555 - DNA, 20 bp, artificial
  human GFAT antisense
atcatgatcacaggcatcaa

SEQ ID NO: 556 - DNA, 20 bp, artificial
  human GFAT antisense
gatcatgatcacaggcatca

SEQ ID NO: 557 - DNA, 20 bp, artificial
  human GFAT antisense
cttgtgttgcttaatcatac

SEQ ID NO: 558 - DNA, 20 bp, artificial
  human GFAT antisense
acccttccctaactgtccaa

SEQ ID NO: 559 - DNA, 20 bp, artificial
  human GFAT antisense
ggggtggcgccgacacgact

SEQ ID NO: 560 - DNA, 20 bp, artificial
  human GFAT antisense
tgggcaatctgcgggctcgg

SEQ ID NO: 561 - DNA, 20 bp, artificial
  human GFAT antisense
tttgtagttggtgatgattc

SEQ ID NO: 562 - DNA, 20 bp, artificial
  human GFAT antisense
atcttgactttcccgattgt

SEQ ID NO: 563 - DNA, 20 bp, artificial
  human GFAT antisense
ataactctctccaccaaggt

SEQ ID NO: 564 - DNA, 20 bp, artificial
  human GFAT antisense
ttgcccttcatgatctgctg

SEQ ID NO: 565 - DNA, 20 bp, artificial
  human GFAT antisense
ttccttctgcataaatgaac

SEQ ID NO: 566 - DNA, 20 bp, artificial
  human GFAT antisense
ttaaatacaaaaggtgtctt

SEQ ID NO: 567 - DNA, 20 bp, artificial
  human GFAT antisense
tttaaatacaaaaggtgtct

SEQ ID NO: 568 - DNA, 20 bp, artificial
  human GFAT antisense
gccactggctttagatactc

SEQ ID NO: 569 - DNA, 20 bp, artificial
  human GFAT antisense
cgaggccaggggcgagtggc

SEQ ID NO: 570 - DNA, 20 bp, artificial
  human GFAT antisense
atgccggagacacggcccgc

SEQ ID NO: 571 - DNA, 20 bp, artificial
  human GFAT antisense
acgggtatgagctattccaa

SEQ ID NO: 572 - DNA, 20 bp, artificial
  human GFAT antisense
gctgggggtggctattgaca

SEQ ID NO: 573 - DNA, 20 bp, artificial
  human GFAT antisense
gtttcagattcgaagtcata

SEQ ID NO: 574 - DNA, 20 bp, artificial
  human GFAT antisense
ctttttcttccaccgggaaa

SEQ ID NO: 575 - DNA, 20 bp, artificial
  human GFAT antisense
cggggtgatctcctgcagtt

SEQ ID NO: 576 - DNA, 20 bp, artificial
  human GFAT antisense
ttccatctggagtgtttgca

SEQ ID NO: 577 - DNA, 20 bp, artificial
  human GFAT antisense
tttccttctgcataaatgaa

SEQ ID NO: 578 - DNA, 20 bp, artificial
  human GFAT antisense
ctcaaatatttccttctgca

SEQ ID NO: 579 - DNA, 20 bp, artificial
  human GFAT antisense
accatcacaggcaactcagt

SEQ ID NO: 580 - DNA, 20 bp, artificial
  human GFAT antisense
gtgtgtttctgtccaggaag

SEQ ID NO: 581 - DNA, 20 bp, artificial
  human GFAT antisense
ctttgtactggccacaccaa

SEQ ID NO: 582 - DNA, 20 bp, artificial
  human GFAT antisense
tcctccttatcacaaattac

SEQ ID NO: 583 - DNA, 20 bp, artificial
  human GFAT antisense
taaatacaaaaggtgtcttg

SEQ ID NO: 584 - DNA, 20 bp, artificial
  human GFAT antisense
gtccaagtatgagcatacac

SEQ ID NO: 585 - DNA, 20 bp, artificial
  human GFAT antisense
tttacagtttgatttaaaaa

SEQ ID NO: 586 - DNA, 20 bp, artificial
  human GFAT antisense
tcaatattaatttaatagca

SEQ ID NO: 587 - DNA, 20 bp, artificial
  human GFAT antisense
ccggggtggcgccgacacga

SEQ ID NO: 588 - DNA, 20 bp, artificial
  human GFAT antisense
tccaggatttctcgtctcgt

SEQ ID NO: 589 - DNA, 20 bp, artificial
  human GFAT antisense
tctccaggatttctcgtctc

SEQ ID NO: 590 - DNA, 20 bp, artificial
  human GFAT antisense
tcttcatccagtgccttaac

SEQ ID NO: 591 - DNA, 20 bp, artificial
  human GFAT antisense
gattcgaagtcatagccttt

SEQ ID NO: 592 - DNA, 20 bp, artificial
  human GFAT antisense
tctgtccaggaagtcacttg

SEQ ID NO: 593 - DNA, 20 bp, artificial
  human GFAT antisense
catgatcacaggcatcaatt

SEQ ID NO: 594 - DNA, 20 bp, artificial
  human GFAT antisense
atcgttctttttgtgttctt

SEQ ID NO: 595 - DNA, 20 bp, artificial
  human GFAT antisense
aagtagtaggatacccaaca

SEQ ID NO: 596 - DNA, 20 bp, artificial
  human GFAT antisense
agggtctccaggatttctcg

SEQ ID NO: 597 - DNA, 20 bp, artificial
  human GFAT antisense
cagaatcatatcctctgtac

SEQ ID NO: 598 - DNA, 20 bp, artificial
  human GFAT antisense
tccagtgccttaacttttcc

SEQ ID NO: 599 - DNA, 20 bp, artificial
  human GFAT antisense
attccattgtgaataacgat

SEQ ID NO: 600 - DNA, 20 bp, artificial
  human GFAT antisense
tcctttcttgtctttgcctg

SEQ ID NO: 601 - DNA, 20 bp, artificial
  human GFAT antisense
gctttttcttccaccgggaa

SEQ ID NO: 602 - DNA, 20 bp, artificial
  human GFAT antisense
aagacgtccatccactactg

SEQ ID NO: 603 - DNA, 20 bp, artificial
  human GFAT antisense
ccggcatctctggatctcct

SEQ ID NO: 604 - DNA, 20 bp, artificial
  human GFAT antisense
agttccaccatcacaggcaa

SEQ ID NO: 605 - DNA, 20 bp, artificial
  human GFAT antisense
tataagcctttgtactggcc

SEQ ID NO: 606 - DNA, 20 bp, artificial
  human GFAT antisense
gccagcaactgtaaagggat

SEQ ID NO: 607 - DNA, 20 bp, artificial
  human GFAT antisense
agccagcaactgtaaaggga

SEQ ID NO: 608 - DNA, 20 bp, artificial
  human GFAT antisense
tcttgtgttgcttaatcata

SEQ ID NO: 609 - DNA, 20 bp, artificial
  human GFAT antisense
acaaaaggtgtcttgtgttg

SEQ ID NO: 610 - DNA, 20 bp, artificial
  human GFAT antisense
aaagtagtaggatacccaac

SEQ ID NO: 611 - DNA, 20 bp, artificial
  human GFAT antisense
agtgccttaacttttccttt

SEQ ID NO: 612 - DNA, 20 bp, artificial
  human GFAT antisense
gctattccaaggtgtacatc

SEQ ID NO: 613 - DNA, 20 bp, artificial
  human GFAT antisense
ggggtggctattgacaggac

SEQ ID NO: 614 - DNA, 20 bp, artificial
  human GFAT antisense
gacgcgattggtgtgttcta

SEQ ID NO: 615 - DNA, 20 bp, artificial
  human GFAT antisense
tatttccttctgcataaatg

SEQ ID NO: 616 - DNA, 20 bp, artificial
  human GFAT antisense
aatatttccttctgcataaa

SEQ ID NO: 617 - DNA, 20 bp, artificial
  human GFAT antisense
caaatatttccttctgcata

SEQ ID NO: 618 - DNA, 20 bp, artificial
  human GFAT antisense
aagtgtgatctctcatgatg

SEQ ID NO: 619 - DNA, 20 bp, artificial
  human GFAT antisense
tgcactactctttcactggt

SEQ ID NO: 620 - DNA, 20 bp, artificial
  human GFAT antisense
ttaagttttacagtttgatt

SEQ ID NO: 621 - DNA, 20 bp, artificial
  human GFAT antisense
caccagcagaatcatatcct

SEQ ID NO: 622 - DNA, 20 bp, artificial
  human GFAT antisense
attgacaggactgggttctc

SEQ ID NO: 623 - DNA, 20 bp, artificial
  human GFAT antisense
agagattgcagcttcctttc

SEQ ID NO: 624 - DNA, 20 bp, artificial
  human GFAT antisense
cgagagagattgcagcttcc

SEQ ID NO: 625 - DNA, 20 bp, artificial
  human GFAT antisense
ggtgatctcctgcagttcgt

SEQ ID NO: 626 - DNA, 20 bp, artificial
  human GFAT antisense
tctctggatctcctttatgt

SEQ ID NO: 627 - DNA, 20 bp, artificial
  human GFAT antisense
tcctccacaaattactggga

SEQ ID NO: 628 - DNA, 20 bp, artificial
  human GFAT antisense
gcagcttgaatttaaagttt

SEQ ID NO: 629 - DNA, 20 bp, artificial
  human GFAT antisense
agtaggatacccaacatgta

SEQ ID NO: 630 - DNA, 20 bp, artificial
  human GFAT antisense
cgtctcgttcgaggaacatg

SEQ ID NO: 631 - DNA, 20 bp, artificial
  human GFAT antisense
cagtgccttaacttttcctt

SEQ ID NO: 632 - DNA, 20 bp, artificial
  human GFAT antisense
ttccattgtgaataacgata

SEQ ID NO: 633 - DNA, 20 bp, artificial
  human GFAT antisense
gtctttgtagttggtgatga

SEQ ID NO: 634 - DNA, 20 bp, artificial
  human GFAT antisense
gctcgtccggggtgatctcc

SEQ ID NO: 635 - DNA, 20 bp, artificial
  human GFAT antisense
ctgaagttgcccttcatgat

SEQ ID NO: 636 - DNA, 20 bp, artificial
  human GFAT antisense
catctctggatctcctttat

SEQ ID NO: 637 - DNA, 20 bp, artificial
  human GFAT antisense
tgtgtttgtgatccccacag

SEQ ID NO: 638 - DNA, 20 bp, artificial
  human GFAT antisense
aggcagccgtttcaatccaa

SEQ ID NO: 639 - DNA, 20 bp, artificial
  human GFAT antisense
tttcagtgccccttcaagac

SEQ ID NO: 640 - DNA, 20 bp, artificial
  human GFAT antisense
cctccttatcacaaattacc

SEQ ID NO: 641 - DNA, 20 bp, artificial
  human GFAT antisense
cagtatcctccttatcacaa

SEQ ID NO: 642 - DNA, 20 bp, artificial
  human GFAT antisense
ttgaatttaaagtttgtgct

SEQ ID NO: 643 - DNA, 20 bp, artificial
  human GFAT antisense
agtagtaggatacccaacat

SEQ ID NO: 644 - DNA, 20 bp, artificial
  human GFAT antisense
ctgaaggcctttgattaggg

SEQ ID NO: 645 - DNA, 20 bp, artificial
  human GFAT antisense
tcctctgtactccagtctct

SEQ ID NO: 646 - DNA, 20 bp, artificial
  human GFAT antisense
agaatcatatcctctgtact

SEQ ID NO: 647 - DNA, 20 bp, artificial
  human GFAT antisense
tctttatcattgcctccatc

SEQ ID NO: 648 - DNA, 20 bp, artificial
  human GFAT antisense
gggtgatctcctgcagttcg

SEQ ID NO: 649 - DNA, 20 bp, artificial
  human GFAT antisense
tctcctttatgtgatccttc

SEQ ID NO: 650 - DNA, 20 bp, artificial
  human GFAT antisense
ccaactgtgtttgtgatccc

SEQ ID NO: 651 - DNA, 20 bp, artificial
  human GFAT antisense
tgtgttgcttaatcatacag

SEQ ID NO: 652 - DNA, 20 bp, artificial
  human GFAT antisense
cacaaattactgggaaaatg

SEQ ID NO: 653 - DNA, 20 bp, artificial
  human GFAT antisense
tttaaagtttgtgctataaa

SEQ ID NO: 654 - DNA, 20 bp, artificial
  human GFAT antisense
aagcagcttgaatttaaagt

SEQ ID NO: 655 - DNA, 20 bp, artificial
  human GFAT antisense
agacacggcccgcgaggcca

SEQ ID NO: 656 - DNA, 20 bp, artificial
  human GFAT antisense
accagcagaatcatatcctc

SEQ ID NO: 657 - DNA, 20 bp, artificial
  human GFAT antisense
ttatcattgcctccatcaaa

SEQ ID NO: 658 - DNA, 20 bp, artificial
  human GFAT antisense
cctcgccttgtgccaactgc

SEQ ID NO: 659 - DNA, 20 bp, artificial
  human GFAT antisense
ctttcttgtctttgcctgtt

SEQ ID NO: 660 - DNA, 20 bp, artificial
  human GFAT antisense
tccttatcacaaattaccac

SEQ ID NO: 661 - DNA, 20 bp, artificial
  human GFAT antisense
ttttaaatacaaaaggtgtc

SEQ ID NO: 662 - DNA, 20 bp, artificial
  human GFAT antisense
cctccacaaattactgggaa

SEQ ID NO: 663 - DNA, 20 bp, artificial
  human GFAT antisense
gtggcgccgacacgactccc

SEQ ID NO: 664 - DNA, 20 bp, artificial
  human GFAT antisense
gtgcacacacgagcttcggt

SEQ ID NO: 665 - DNA, 20 bp, artificial
  human GFAT antisense
catatcctctgtactccagt

SEQ ID NO: 666 - DNA, 20 bp, artificial
  human GFAT antisense
tcttgttgcttgtgaacttc

SEQ ID NO: 667 - DNA, 20 bp, artificial
  human GFAT antisense
ttgtagttggtgatgattcc

SEQ ID NO: 668 - DNA, 20 bp, artificial
  human GFAT antisense
gccaactgtgtttgtgatcc

SEQ ID NO: 669 - DNA, 20 bp, artificial
  human GFAT antisense
cgtttcaatccaagcatgat

SEQ ID NO: 670 - DNA, 20 bp, artificial
  human GFAT antisense
caggcagccgtttcaatcca

SEQ ID NO: 671 - DNA, 20 bp, artificial
  human GFAT antisense
ttcagagtgcatataagtaa

SEQ ID NO: 672 - DNA, 20 bp, artificial
  human GFAT antisense
tctcagattgaagtggaggg

SEQ ID NO: 673 - DNA, 20 bp, artificial
  human GFAT antisense
ggatagaaagacgtccatcc

SEQ ID NO: 674 - DNA, 20 bp, artificial
  human GFAT antisense
ctcgtccggggtgatctcct

SEQ ID NO: 675 - DNA, 20 bp, artificial
  human GFAT antisense
ccgtttcaatccaagcatga

SEQ ID NO: 676 - DNA, 20 bp, artificial
  human GFAT antisense
ctgacttctgatgataaagt

SEQ ID NO: 677 - DNA, 20 bp, artificial
  human GFAT antisense
tcagagtgcatataagtaat

SEQ ID NO: 678 - DNA, 20 bp, artificial
  human GFAT antisense
cttcagagtgcatataagta

SEQ ID NO: 679 - DNA, 20 bp, artificial
  human GFAT antisense
actggctttagatactccaa

SEQ ID NO: 680 - DNA, 20 bp, artificial
  human GFAT antisense
atgagcatacactgccactg

SEQ ID NO: 681 - DNA, 20 bp, artificial
  human GFAT antisense
gtatgagcatacactgccac

SEQ ID NO: 682 - DNA, 20 bp, artificial
  human GFAT antisense
gttttaagttttacagtttg

SEQ ID NO: 683 - DNA, 20 bp, artificial
  human GFAT antisense
agttttaagttttacagttt

SEQ ID NO: 684 - DNA, 20 bp, artificial
  human GFAT antisense
tgaatttaaagtttgtgcta

SEQ ID NO: 685 - DNA, 20 bp, artificial
  human GFAT antisense
tggcgccgacacgactccct

SEQ ID NO: 686 - DNA, 20 bp, artificial
  human GFAT antisense
gtctctgaaggcctttgatt

SEQ ID NO: 687 - DNA, 20 bp, artificial
  human GFAT antisense
attcattatttttatcagag

SEQ ID NO: 688 - DNA, 20 bp, artificial
  human GFAT antisense
atactccactgctttttctt

SEQ ID NO: 689 - DNA, 20 bp, artificial
  human GFAT antisense
atcacaggcatcaatttatc

SEQ ID NO: 690 - DNA, 20 bp, artificial
  human GFAT antisense
agcatacactgccactggct

SEQ ID NO: 691 - DNA, 20 bp, artificial
  human GFAT antisense
aagtttgtgctataaaattg

SEQ ID NO: 692 - DNA, 20 bp, artificial
  human GFAT antisense
gtctcgttcgaggaacatgg

SEQ ID NO: 693 - DNA, 20 bp, artificial
  human GFAT antisense
attgcctccatcaaatccca

SEQ ID NO: 694 - DNA, 20 bp, artificial
  human GFAT antisense
gcccaacgggtatgagctat

SEQ ID NO: 695 - DNA, 20 bp, artificial
  human GFAT antisense
atgtgttgcccaacgggtat

SEQ ID NO: 696 - DNA, 20 bp, artificial
  human GFAT antisense
ggctattgacaggactgggt

SEQ ID NO: 697 - DNA, 20 bp, artificial
  human GFAT antisense
aattgtctctgtgtctgttt

SEQ ID NO: 698 - DNA, 20 bp, artificial
  human GFAT antisense
gcttcctttcttgtctttgc

SEQ ID NO: 699 - DNA, 20 bp, artificial
  human GFAT antisense
actgtgtttgtgatccccac

SEQ ID NO: 700 - DNA, 20 bp, artificial
  human GFAT antisense
gcagccgtttcaatccaagc

SEQ ID NO: 701 - DNA, 20 bp, artificial
  human GFAT antisense
tgatcatgatcacaggcatc

SEQ ID NO: 702 - DNA, 20 bp, artificial
  human GFAT antisense
tgtgttcttaatggtctcag

SEQ ID NO: 703 - DNA, 20 bp, artificial
  human GFAT antisense
agcaactgtaaagggatcac

SEQ ID NO: 704 - DNA, 20 bp, artificial
  human GFAT antisense
ataatagctagaatctttct

SEQ ID NO: 705 - DNA, 20 bp, artificial
  human GFAT antisense
aacatattgtcttctcagat

SEQ ID NO: 706 - DNA, 20 bp, artificial
  human GFAT antisense
agtaccaatttttagaaaca

SEQ ID NO: 707 - DNA, 20 bp, artificial
  human GFAT antisense
ctggctttagatactccaat

SEQ ID NO: 708 - DNA, 20 bp, artificial
  human GFAT antisense
tatgagcatacactgccact

SEQ ID NO: 709 - DNA, 20 bp, artificial
  human GFAT antisense
aaagtttgtgctataaaatt

SEQ ID NO: 710 - DNA, 20 bp, artificial
  human GFAT antisense
gtgccttaacttttcctttc

SEQ ID NO: 711 - DNA, 20 bp, artificial
  human GFAT antisense
cagagcgctgggggtggcta

SEQ ID NO: 712 - DNA, 20 bp, artificial
  human GFAT antisense
gctggtatcttgactttccc

SEQ ID NO: 713 - DNA, 20 bp, artificial
  human GFAT antisense
gtgtttgtgatccccacagt

SEQ ID NO: 714 - DNA, 20 bp, artificial
  human GFAT antisense
tatgaactccacaatctgtc

SEQ ID NO: 715 - DNA, 20 bp, artificial
  human GFAT antisense
tcataagggcaaacatcaca

SEQ ID NO: 716 - DNA, 20 bp, artificial
  human GFAT antisense
actgacttctgatgataaag

SEQ ID NO: 717 - DNA, 20 bp, artificial
  human GFAT antisense
cagagtgcatataagtaatt

SEQ ID NO: 718 - DNA, 20 bp, artificial
  human GFAT antisense
cacttggcataagtgtgatc

SEQ ID NO: 719 - DNA, 20 bp, artificial
  human GFAT antisense
tttaaatcaaggttttaaat

SEQ ID NO: 720 - DNA, 20 bp, artificial
  human GFAT antisense
ttttaaatcaaggttttaaa

SEQ ID NO: 721 - DNA, 20 bp, artificial
  human GFAT antisense
tcactggtctgaatgaagta

SEQ ID NO: 722 - DNA, 20 bp, artificial
  human GFAT antisense
tttcttccacctacagataa

SEQ ID NO: 723 - DNA, 20 bp, artificial
  human GFAT antisense
acacaaagtagtaggatacc

SEQ ID NO: 724 - DNA, 20 bp, artificial
  human GFAT antisense
gagatgaaaacacaaagtag

SEQ ID NO: 725 - DNA, 20 bp, artificial
  human GFAT antisense
tctctgaaggcctttgatta

SEQ ID NO: 726 - DNA, 20 bp, artificial
  human GFAT antisense
gcagaatcatatcctctgta

SEQ ID NO: 727 - DNA, 20 bp, artificial
  human GFAT antisense
catgtgttgcccaacgggta

SEQ ID NO: 728 - DNA, 20 bp, artificial
  human GFAT antisense
tccattgtgaataacgataa

SEQ ID NO: 729 - DNA, 20 bp, artificial
  human GFAT antisense
ttgactttcccgattgtcat

SEQ ID NO: 730 - DNA, 20 bp, artificial
  human GFAT antisense
cttccagaaagatgacgcga

SEQ ID NO: 731 - DNA, 20 bp, artificial
  human GFAT antisense
gatagaaagacgtccatcca

SEQ ID NO: 732 - DNA, 20 bp, artificial
  human GFAT antisense
gatcacaggcatcaatttat

SEQ ID NO: 733 - DNA, 20 bp, artificial
  human GFAT antisense
gatgatcatgatcacaggca

SEQ ID NO: 734 - DNA, 20 bp, artificial
  human GFAT antisense
taagtgtgatctctcatgat

SEQ ID NO: 735 - DNA, 20 bp, artificial
  human GFAT antisense
ataagtgtgatctctcatga

SEQ ID NO: 736 - DNA, 20 bp, artificial
  human GFAT antisense
tggcataagtgtgatctctc

SEQ ID NO: 737 - DNA, 20 bp, artificial
  human GFAT antisense
ctcagattgaagtggagggt

SEQ ID NO: 738 - DNA, 20 bp, artificial
  human GFAT antisense
tttaagttttacagtttgat

SEQ ID NO: 739 - DNA, 20 bp, artificial
  human GFAT antisense
ttcttccacctacagataat

SEQ ID NO: 740 - DNA, 20 bp, artificial
  human GFAT antisense
cacaaagtagtaggataccc

SEQ ID NO: 741 - DNA, 20 bp, artificial
  human GFAT antisense
attaatttaatagcagctct

SEQ ID NO: 742 - DNA, 20 bp, artificial
  human GFAT antisense
tctgaaggcctttgattagg

SEQ ID NO: 743 - DNA, 20 bp, artificial
  human GFAT antisense
ctctgaaggcctttgattag

SEQ ID NO: 744 - DNA, 20 bp, artificial
  human GFAT antisense
ctggtatcttgactttcccg

SEQ ID NO: 745 - DNA, 20 bp, artificial
  human GFAT antisense
gactggtgtgtttctgtcca

SEQ ID NO: 746 - DNA, 20 bp, artificial
  human GFAT antisense
gagatccgatcatcacacat

SEQ ID NO: 747 - DNA, 20 bp, artificial
  human GFAT antisense
tgtgatctctcatgatgatc

SEQ ID NO: 748 - DNA, 20 bp, artificial
  human GFAT antisense
aactgtaaagggatcacgct

SEQ ID NO: 749 - DNA, 20 bp, artificial
  human GFAT antisense
ttcagttttaagttttacag

SEQ ID NO: 750 - DNA, 20 bp, artificial
  human GFAT antisense
ttaaagtttgtgctataaaa

SEQ ID NO: 751 - DNA, 20 bp, artificial
  human GFAT antisense
ccaggggcgagtggctggcg

SEQ ID NO: 752 - DNA, 20 bp, artificial
  human GFAT antisense
catggtagtttaagtaagca

SEQ ID NO: 753 - DNA, 20 bp, artificial
  human GFAT antisense
gcctccatcaaatcccacac

SEQ ID NO: 754 - DNA, 20 bp, artificial
  human GFAT antisense
cattgcctccatcaaatccc

SEQ ID NO: 755 - DNA, 20 bp, artificial
  human GFAT antisense
atgagctattccaaggtgta

SEQ ID NO: 756 - DNA, 20 bp, artificial
  human GFAT antisense
tatgagctattccaaggtgt

SEQ ID NO: 757 - DNA, 20 bp, artificial
  human GFAT antisense
gatgattccattgtgaataa

SEQ ID NO: 758 - DNA, 20 bp, artificial
  human GFAT antisense
gtgatctcctgcagttcgtt

SEQ ID NO: 759 - DNA, 20 bp, artificial
  human GFAT antisense
gccggcatctctggatctcc

SEQ ID NO: 760 - DNA, 20 bp, artificial
  human GFAT antisense
tccaccatcacaggcaactc

SEQ ID NO: 761 - DNA, 20 bp, artificial
  human GFAT antisense
gttgctagtttctgaatttc

SEQ ID NO: 762 - DNA, 20 bp, artificial
  human GFAT antisense
tcacaggcatcaatttatcc

SEQ ID NO: 763 - DNA, 20 bp, artificial
  human GFAT antisense
aagccagcaactgtaaaggg

SEQ ID NO: 764 - DNA, 20 bp, artificial
  human GFAT antisense
atgcactactctttcactgg

SEQ ID NO: 765 - DNA, 20 bp, artificial
  human GFAT antisense
taaagtttgtgctataaaat

SEQ ID NO: 766 - DNA, 20 bp, artificial
  human GFAT antisense
aatcatattgtcagttgtcc

SEQ ID NO: 767 - DNA, 20 bp, artificial
  human GFAT antisense
caggggcgagtggctggcgg

SEQ ID NO: 768 - DNA, 20 bp, artificial
  human GFAT antisense
gcaaatataccacacatgat

SEQ ID NO: 769 - DNA, 20 bp, artificial
  human GFAT antisense
agcaaatataccacacatga

SEQ ID NO: 770 - DNA, 20 bp, artificial
  human GFAT antisense
gaaggcctttgattagggtc

SEQ ID NO: 771 - DNA, 20 bp, artificial
  human GFAT antisense
tgagctattccaaggtgtac

SEQ ID NO: 772 - DNA, 20 bp, artificial
  human GFAT antisense
caggactgggttctccatgt

SEQ ID NO: 773 - DNA, 20 bp, artificial
  human GFAT antisense
gagattgcagcttcctttct

SEQ ID NO: 774 - DNA, 20 bp, artificial
  human GFAT antisense
aactgaagttgcccttcatg

SEQ ID NO: 775 - DNA, 20 bp, artificial
  human GFAT antisense
cacagtatagtcatcaaagt

SEQ ID NO: 776 - DNA, 20 bp, artificial
  human GFAT antisense
ttccaccatcacaggcaact

SEQ ID NO: 777 - DNA, 20 bp, artificial
  human GFAT antisense
atatgaactccacaatctgt

SEQ ID NO: 778 - DNA, 20 bp, artificial
  human GFAT antisense
tcatacagtttcgtacattt

SEQ ID NO: 779 - DNA, 20 bp, artificial
  human GFAT antisense
gtctgaatgaagtatggtga

SEQ ID NO: 780 - DNA, 20 bp, artificial
  human GFAT antisense
actactctttcactggtctg

SEQ ID NO: 781 - DNA, 20 bp, artificial
  human GFAT antisense
gcactactctttcactggtc

SEQ ID NO: 782 - DNA, 20 bp, artificial
  human GFAT antisense
aattcattatttttatcaga

SEQ ID NO: 783 - DNA, 20 bp, artificial
  human GFAT antisense
gcttggcaattgtctctgtg

SEQ ID NO: 784 - DNA, 20 bp, artificial
  human GFAT antisense
caccaaggtagtaaagctgg

SEQ ID NO: 785 - DNA, 20 bp, artificial
  human GFAT antisense
actctctccaccaaggtagt

SEQ ID NO: 786 - DNA, 20 bp, artificial
  human GFAT antisense
ccgggaaaaggcaggttgtg

SEQ ID NO: 787 - DNA, 20 bp, artificial
  human GFAT antisense
cgattggtgtgttctatgac

SEQ ID NO: 788 - DNA, 20 bp, artificial
  human GFAT antisense
agacgtccatccactactgc

SEQ ID NO: 789 - DNA, 20 bp, artificial
  human GFAT antisense
tagaaagacgtccatccact

SEQ ID NO: 790 - DNA, 20 bp, artificial
  human GFAT antisense
atagaaagacgtccatccac

SEQ ID NO: 791 - DNA, 20 bp, artificial
  human GFAT antisense
aaatatttccttctgcataa

SEQ ID NO: 792 - DNA, 20 bp, artificial
  human GFAT antisense
ggagatccgatcatcacaca

SEQ ID NO: 793 - DNA, 20 bp, artificial
  human GFAT antisense
atcatacagtttcgtacatt

SEQ ID NO: 794 - DNA, 20 bp, artificial
  human GFAT antisense
ccacaaattactgggaaaat

SEQ ID NO: 795 - DNA, 20 bp, artificial
  human GFAT antisense
cttgaatttaaagtttgtgc

SEQ ID NO: 796 - DNA, 20 bp, artificial
  human GFAT antisense
gtttaagtaagcaaatatac

SEQ ID NO: 797 - DNA, 20 bp, artificial
  human GFAT antisense
ctgggttctccatgtgttgc

SEQ ID NO: 798 - DNA, 20 bp, artificial
  human GFAT antisense
actgggttctccatgtgttg

SEQ ID NO: 799 - DNA, 20 bp, artificial
  human GFAT antisense
ccattgtgaataacgataaa

SEQ ID NO: 800 - DNA, 20 bp, artificial
  human GFAT antisense
caagtctttgtagttggtga

SEQ ID NO: 801 - DNA, 20 bp, artificial
  human GFAT antisense
ctctgtgtctgtttcagatt

SEQ ID NO: 802 - DNA, 20 bp, artificial
  human GFAT antisense
ggtagtaaagctggtatctt

SEQ ID NO: 803 - DNA, 20 bp, artificial
  human GFAT antisense
aatactccactgctttttct

SEQ ID NO: 804 - DNA, 20 bp, artificial
  human GFAT antisense
tccggggtgatctcctgcag

SEQ ID NO: 805 - DNA, 20 bp, artificial
  human GFAT antisense
gtatagtcatcaaagttgac

SEQ ID NO: 806 - DNA, 20 bp, artificial
  human GFAT antisense
gccacaccaatctcaggacc

SEQ ID NO: 807 - DNA, 20 bp, artificial
  human GFAT antisense
tgcatataagtaatttcttt

SEQ ID NO: 808 - DNA, 20 bp, artificial
  human GFAT antisense
aaggatgccttcagagtgca

SEQ ID NO: 809 - DNA, 20 bp, artificial
  human GFAT antisense
aggcatcaatttatccacca

SEQ ID NO: 810 - DNA, 20 bp, artificial
  human GFAT antisense
ttgatcgttctttttgtgtt

SEQ ID NO: 811 - DNA, 20 bp, artificial
  human GFAT antisense
acatattgtcttctcagatt

SEQ ID NO: 812 - DNA, 20 bp, artificial
  human GFAT antisense
cactactctttcactggtct

SEQ ID NO: 813 - DNA, 20 bp, artificial
  human GFAT antisense
ttacagtttgatttaaaaac

SEQ ID NO: 814 - DNA, 20 bp, artificial
  human GFAT antisense
atatcaatattaatttaata

SEQ ID NO: 815 - DNA, 20 bp, artificial
  human GFAT antisense
gagacacggcccgcgaggcc

SEQ ID NO: 816 - DNA, 20 bp, artificial
  human GFAT antisense
catagcctttgctttccaaa

SEQ ID NO: 817 - DNA, 20 bp, artificial
  human GFAT antisense
aggtagtaaagctggtatct

SEQ ID NO: 818 - DNA, 20 bp, artificial
  human GFAT antisense
gataactctctccaccaagg

SEQ ID NO: 819 - DNA, 20 bp, artificial
  human GFAT antisense
atctcctgcagttcgtttaa

SEQ ID NO: 820 - DNA, 20 bp, artificial
  human GFAT antisense
atcataagggcaaacatcac

SEQ ID NO: 821 - DNA, 20 bp, artificial
  human GFAT antisense
ggcatcaatttatccaccaa

SEQ ID NO: 822 - DNA, 20 bp, artificial
  human GFAT antisense
atgatcatgatcacaggcat

SEQ ID NO: 823 - DNA, 20 bp, artificial
  human GFAT antisense
catattgtcttctcagattg

SEQ ID NO: 824 - DNA, 20 bp, artificial
  human GFAT antisense
tggctttagatactccaatt

SEQ ID NO: 825 - DNA, 20 bp, artificial
  human GFAT antisense
ccctaactgtccaagtatga

SEQ ID NO: 826 - DNA, 20 bp, artificial
  human GFAT antisense
ttttaagttttacagtttga

SEQ ID NO: 827 - DNA, 20 bp, artificial
  human GFAT antisense
tatcaatattaatttaatag

SEQ ID NO: 828 - DNA, 20 bp, artificial
  human GFAT antisense
atctgcgggctcgggggccg

SEQ ID NO: 829 - DNA, 20 bp, artificial
  human GFAT antisense
cttcggtgggcaatctgcgg

SEQ ID NO: 830 - DNA, 20 bp, artificial
  human GFAT antisense
gacacggcccgcgaggccag

SEQ ID NO: 831 - DNA, 20 bp, artificial
  human GFAT antisense
cacatgatgccggagacacg

SEQ ID NO: 832 - DNA, 20 bp, artificial
  human GFAT antisense
acatggtagtttaagtaagc

SEQ ID NO: 833 - DNA, 20 bp, artificial
  human GFAT antisense
attagggtctccaggatttc

SEQ ID NO: 834 - DNA, 20 bp, artificial
  human GFAT antisense
ctgggggtggctattgacag

SEQ ID NO: 835 - DNA, 20 bp, artificial
  human GFAT antisense
tcttccagaaagatgacgcg

SEQ ID NO: 836 - DNA, 20 bp, artificial
  human GFAT antisense
ttctgtccaggaagtcactt

SEQ ID NO: 837 - DNA, 20 bp, artificial
  human GFAT antisense
aactgtgtttgtgatcccca

SEQ ID NO: 838 - DNA, 20 bp, artificial
  human GFAT antisense
ttcagtgccccttcaagaca

SEQ ID NO: 839 - DNA, 20 bp, artificial
  human GFAT antisense
ccttcagagtgcatataagt

SEQ ID NO: 840 - DNA, 20 bp, artificial
  human GFAT antisense
tgatgatcatgatcacaggc

SEQ ID NO: 841 - DNA, 20 bp, artificial
  human GFAT antisense
ttgtgttcttaatggtctca

SEQ ID NO: 842 - DNA, 20 bp, artificial
  human GFAT antisense
tcgttctttttgtgttctta

SEQ ID NO: 843 - DNA, 20 bp, artificial
  human GFAT antisense
ttaaatcaaggttttaaata

SEQ ID NO: 844 - DNA, 20 bp, artificial
  human GFAT antisense
cacatattgagtggaataat

SEQ ID NO: 845 - DNA, 20 bp, artificial
  human GFAT antisense
cacaaaaatcacatattgag

SEQ ID NO: 846 - DNA, 20 bp, artificial
  human GFAT antisense
ccaattaaatgcactactct

SEQ ID NO: 847 - DNA, 20 bp, artificial
  human GFAT antisense
agtatgagcatacactgcca

SEQ ID NO: 848 - DNA, 20 bp, artificial
  human GFAT antisense
agatacaaggaaataaaaaa

SEQ ID NO: 849 - DNA, 20 bp, artificial
  human GFAT antisense
atctttatcattgcctccat

SEQ ID NO: 850 - DNA, 20 bp, artificial
  human GFAT antisense
atcttgttgcttgtgaactt

SEQ ID NO: 851 - DNA, 20 bp, artificial
  human GFAT antisense
agcttggcaattgtctctgt

SEQ ID NO: 852 - DNA, 20 bp, artificial
  human GFAT antisense
tgacgcgattggtgtgttct

SEQ ID NO: 853 - DNA, 20 bp, artificial
  human GFAT antisense
tctcattgtgttcacgacag

SEQ ID NO: 854 - DNA, 20 bp, artificial
  human GFAT antisense
gcatctctggatctccttta

SEQ ID NO: 855 - DNA, 20 bp, artificial
  human GFAT antisense
cggcatctctggatctcctt

SEQ ID NO: 856 - DNA, 20 bp, artificial
  human GFAT antisense
ttgttccacaagcaataaga

SEQ ID NO: 857 - DNA, 20 bp, artificial
  human GFAT antisense
ttcaagacaagtagcataat

SEQ ID NO: 858 - DNA, 20 bp, artificial
  human GFAT antisense
tgatcacaggcatcaattta

SEQ ID NO: 859 - DNA, 20 bp, artificial
  human GFAT antisense
acatattgagtggaataatt

SEQ ID NO: 860 - DNA, 20 bp, artificial
  human GFAT antisense
acttcacaaaaatcacatat

SEQ ID NO: 861 - DNA, 20 bp, artificial
  human GFAT antisense
gtcctccacaaattactggg

SEQ ID NO: 862 - DNA, 20 bp, artificial
  human GFAT antisense
acaaggaaataaaaaacact

SEQ ID NO: 863 - DNA, 20 bp, artificial
  human GFAT antisense
gaggccaggggcgagtggct

SEQ ID NO: 864 - DNA, 20 bp, artificial
  human GFAT antisense
gaatcatatcctctgtactc

SEQ ID NO: 865 - DNA, 20 bp, artificial
  human GFAT antisense
caattgtctctgtgtctgtt

SEQ ID NO: 866 - DNA, 20 bp, artificial
  human GFAT antisense
tgactttcccgattgtcata

SEQ ID NO: 867 - DNA, 20 bp, artificial
  human GFAT antisense
ctcgccttgtgccaactgct

SEQ ID NO: 868 - DNA, 20 bp, artificial
  human GFAT antisense
acctcgccttgtgccaactg

SEQ ID NO: 869 - DNA, 20 bp, artificial
  human GFAT antisense
ctccactgctttttcttcca

SEQ ID NO: 870 - DNA, 20 bp, artificial
  human GFAT antisense
gtaatactccactgcttttt

SEQ ID NO: 871 - DNA, 20 bp, artificial
  human GFAT antisense
tccagaaagatgacgcgatt

SEQ ID NO: 872 - DNA, 20 bp, artificial
  human GFAT antisense
ttccagaaagatgacgcgat

SEQ ID NO: 873 - DNA, 20 bp, artificial
  human GFAT antisense
gacgtccatccactactgct

SEQ ID NO: 874 - DNA, 20 bp, artificial
  human GFAT antisense
tctcctgcagttcgtttaat

SEQ ID NO: 875 - DNA, 20 bp, artificial
  human GFAT antisense
gatctcctgcagttcgttta

SEQ ID NO: 876 - DNA, 20 bp, artificial
  human GFAT antisense
acagtatagtcatcaaagtt

SEQ ID NO: 877 - DNA, 20 bp, artificial
  human GFAT antisense
acatcataagggcaaacatc

SEQ ID NO: 878 - DNA, 20 bp, artificial
  human GFAT antisense
ggcagccgtttcaatccaag

SEQ ID NO: 879 - DNA, 20 bp, artificial
  human GFAT antisense
tcaggcagccgtttcaatcc

SEQ ID NO: 880 - DNA, 20 bp, artificial
  human GFAT antisense
ccttcaagacaagtagcata

SEQ ID NO: 881 - DNA, 20 bp, artificial
  human GFAT antisense
atctctcatgatgatcatga

SEQ ID NO: 882 - DNA, 20 bp, artificial
  human GFAT antisense
ggctttagatactccaatta

SEQ ID NO: 883 - DNA, 20 bp, artificial
  human GFAT antisense
gtaggatacccaacatgtac

SEQ ID NO: 884 - DNA, 20 bp, artificial
  human GFAT antisense
caaggaaataaaaaacactt

SEQ ID NO: 885 - DNA, 20 bp, artificial
  human GFAT antisense
tggctattgacaggactggg

SEQ ID NO: 886 - DNA, 20 bp, artificial
  human GFAT antisense
gtggctattgacaggactgg

SEQ ID NO: 887 - DNA, 20 bp, artificial
  human GFAT antisense
agtaatactccactgctttt

SEQ ID NO: 888 - DNA, 20 bp, artificial
  human GFAT antisense
ttcacagtatagtcatcaaa

SEQ ID NO: 889 - DNA, 20 bp, artificial
  human GFAT antisense
accacccaaattcacagtat

SEQ ID NO: 890 - DNA, 20 bp, artificial
  human GFAT antisense
ctcctttatgtgatccttca

SEQ ID NO: 891 - DNA, 20 bp, artificial
  human GFAT antisense
tggtgtgtttctgtccagga

SEQ ID NO: 892 - DNA, 20 bp, artificial
  human GFAT antisense
cataagggcaaacatcacaa

SEQ ID NO: 893 - DNA, 20 bp, artificial
  human GFAT antisense
agagtgcatataagtaattt

SEQ ID NO: 894 - DNA, 20 bp, artificial
  human GFAT antisense
tttggcaagattccgtggga

SEQ ID NO: 895 - DNA, 20 bp, artificial
  human GFAT antisense
tccattattcaaagtcctcc

SEQ ID NO: 896 - DNA, 20 bp, artificial
  human GFAT antisense
ttcactggtctgaatgaagt

SEQ ID NO: 897 - DNA, 20 bp, artificial
  human GFAT antisense
ctgccactggctttagatac

SEQ ID NO: 898 - DNA, 20 bp, artificial
  human GFAT antisense
cctaccaataaaatttttca

SEQ ID NO: 899 - DNA, 20 bp, artificial
  human GFAT antisense
gggtggcgccgacacgactc

SEQ ID NO: 900 - DNA, 20 bp, artificial
  human GFAT antisense
caatctgcgggctcgggggc

SEQ ID NO: 901 - DNA, 20 bp, artificial
  human GFAT antisense
gatgccggagacacggcccg

SEQ ID NO: 902 - DNA, 20 bp, artificial
  human GFAT antisense
aagtaagcaaatataccaca

SEQ ID NO: 903 - DNA, 20 bp, artificial
  human GFAT antisense
cttaacttttcctttcttct

SEQ ID NO: 904 - DNA, 20 bp, artificial
  human GFAT antisense
tattgacaggactgggttct

SEQ ID NO: 905 - DNA, 20 bp, artificial
  human GFAT antisense
acgataaattcattattttt

SEQ ID NO: 906 - DNA, 20 bp, artificial
  human GFAT antisense
ccaattgttggataactctc

SEQ ID NO: 907 - DNA, 20 bp, artificial
  human GFAT antisense
agcaccttccaattgttgga

SEQ ID NO: 908 - DNA, 20 bp, artificial
  human GFAT antisense
gtgccaactgcttgcccggg

SEQ ID NO: 909 - DNA, 20 bp, artificial
  human GFAT antisense
ctacctcgccttgtgccaac

SEQ ID NO: 910 - DNA, 20 bp, artificial
  human GFAT antisense
acagagggctacctcgcctt

SEQ ID NO: 911 - DNA, 20 bp, artificial
  human GFAT antisense
tttcttgtctttgcctgttc

SEQ ID NO: 912 - DNA, 20 bp, artificial
  human GFAT antisense
gcaaagtaatactccactgc

SEQ ID NO: 913 - DNA, 20 bp, artificial
  human GFAT antisense
gaagcaaagtaatactccac

SEQ ID NO: 914 - DNA, 20 bp, artificial
  human GFAT antisense
ttcatgatctgctggagttc

SEQ ID NO: 915 - DNA, 20 bp, artificial
  human GFAT antisense
tcacagtatagtcatcaaag

SEQ ID NO: 916 - DNA, 20 bp, artificial
  human GFAT antisense
ggcatctctggatctccttt

SEQ ID NO: 917 - DNA, 20 bp, artificial
  human GFAT antisense
aatcaaacgccggcatctct

SEQ ID NO: 918 - DNA, 20 bp, artificial
  human GFAT antisense
caactgtgtttgtgatcccc

SEQ ID NO: 919 - DNA, 20 bp, artificial
  human GFAT antisense
tggagatccgatcatcacac

SEQ ID NO: 920 - DNA, 20 bp, artificial
  human GFAT antisense
tgcatggagatccgatcatc

SEQ ID NO: 921 - DNA, 20 bp, artificial
  human GFAT antisense
tttcaattcaccagcaagga

SEQ ID NO: 922 - DNA, 20 bp, artificial
  human GFAT antisense
tcagattgaagtggagggtc

SEQ ID NO: 923 - DNA, 20 bp, artificial
  human GFAT antisense
acaaagtagtaggataccca

SEQ ID NO: 924 - DNA, 20 bp, artificial
  human GFAT antisense
cgggggtgcacacacgagct

SEQ ID NO: 925 - DNA, 20 bp, artificial
  human GFAT antisense
aggggcgagtggctggcggg

SEQ ID NO: 926 - DNA, 20 bp, artificial
  human GFAT antisense
atgattccattgtgaataac

SEQ ID NO: 927 - DNA, 20 bp, artificial
  human GFAT antisense
aagtctttgtagttggtgat

SEQ ID NO: 928 - DNA, 20 bp, artificial
  human GFAT antisense
tatcttgactttcccgattg

SEQ ID NO: 929 - DNA, 20 bp, artificial
  human GFAT antisense
tcgtccggggtgatctcctg

SEQ ID NO: 930 - DNA, 20 bp, artificial
  human GFAT antisense
ataaatgaactgaagttgcc

SEQ ID NO: 931 - DNA, 20 bp, artificial
  human GFAT antisense
attcacagtatagtcatcaa

SEQ ID NO: 932 - DNA, 20 bp, artificial
  human GFAT antisense
attaatatgaactccacaat

SEQ ID NO: 933 - DNA, 20 bp, artificial
  human GFAT antisense
ttgctagtttctgaatttcg

SEQ ID NO: 934 - DNA, 20 bp, artificial
  human GFAT antisense
aggatgccttcagagtgcat

SEQ ID NO: 935 - DNA, 20 bp, artificial
  human GFAT antisense
gatcgttctttttgtgttct

SEQ ID NO: 936 - DNA, 20 bp, artificial
  human GFAT antisense
ccttgatcgttctttttgtg

SEQ ID NO: 937 - DNA, 20 bp, artificial
  human GFAT antisense
aatcatacagtttcgtacat

SEQ ID NO: 938 - DNA, 20 bp, artificial
  human GFAT antisense
tcacaaaaatcacatattga

SEQ ID NO: 939 - DNA, 20 bp, artificial
  human GFAT antisense
aaattactgggaaaatgtaa

SEQ ID NO: 940 - DNA, 20 bp, artificial
  human GFAT antisense
gtaccaatttttagaaacat

SEQ ID NO: 941 - DNA, 20 bp, artificial
  human GFAT antisense
caagtaccaatttttagaaa

SEQ ID NO: 942 - DNA, 20 bp, artificial
  human GFAT antisense
acaagtaccaatttttagaa

SEQ ID NO: 943 - DNA, 20 bp, artificial
  human GFAT antisense
tattaatttaatagcagctc

SEQ ID NO: 944 - DNA, 20 bp, artificial
  human GFAT antisense
aatataccacacatgatgcc

SEQ ID NO: 945 - DNA, 20 bp, artificial
  human GFAT antisense
attatttttatcagagcgct

SEQ ID NO: 946 - DNA, 20 bp, artificial
  human GFAT antisense
cattatttttatcagagcgc

SEQ ID NO: 947 - DNA, 20 bp, artificial
  human GFAT antisense
ttcaagtctttgtagttggt

SEQ ID NO: 948 - DNA, 20 bp, artificial
  human GFAT antisense
gcaccttccaattgttggat

SEQ ID NO: 949 - DNA, 20 bp, artificial
  human GFAT antisense
gcaaaagcaccttccaattg

SEQ ID NO: 950 - DNA, 20 bp, artificial
  human GFAT antisense
tacctcgccttgtgccaact

SEQ ID NO: 951 - DNA, 20 bp, artificial
  human GFAT antisense
caacagagggctacctcgcc

SEQ ID NO: 952 - DNA, 20 bp, artificial
  human GFAT antisense
agaagcaaagtaatactcca

SEQ ID NO: 953 - DNA, 20 bp, artificial
  human GFAT antisense
cagaagcaaagtaatactcc

SEQ ID NO: 954 - DNA, 20 bp, artificial
  human GFAT antisense
ccagaaagatgacgcgattg

SEQ ID NO: 955 - DNA, 20 bp, artificial
  human GFAT antisense
tagtttctgaatttcgtcat

SEQ ID NO: 956 - DNA, 20 bp, artificial
  human GFAT antisense
tgacttctgatgataaagtt

SEQ ID NO: 957 - DNA, 20 bp, artificial
  human GFAT antisense
aactgacttctgatgataaa

SEQ ID NO: 958 - DNA, 20 bp, artificial
  human GFAT antisense
caccagcaaggatgccttca

SEQ ID NO: 959 - DNA, 20 bp, artificial
  human GFAT antisense
tctctcatgatgatcatgat

SEQ ID NO: 960 - DNA, 20 bp, artificial
  human GFAT antisense
gtttcgtacattttgtatag

SEQ ID NO: 961 - DNA, 20 bp, artificial
  human GFAT antisense
agtttcgtacattttgtata

SEQ ID NO: 962 - DNA, 20 bp, artificial
  human GFAT antisense
aaggttttaaatacaaaagg

SEQ ID NO: 963 - DNA, 20 bp, artificial
  human GFAT antisense
catattgagtggaataatta

SEQ ID NO: 964 - DNA, 20 bp, artificial
  human GFAT antisense
atattgtcttctcagattga

SEQ ID NO: 965 - DNA, 20 bp, artificial
  human GFAT antisense
caattaaatgcactactctt

SEQ ID NO: 966 - DNA, 20 bp, artificial
  human GFAT antisense
tcctaccaataaaatttttc

SEQ ID NO: 967 - DNA, 20 bp, artificial
  human GFAT antisense
tttcgcttcctaaatttctt

SEQ ID NO: 968 - DNA, 20 bp, artificial
  human GFAT antisense
gaatttaaagtttgtgctat

SEQ ID NO: 969 - DNA, 20 bp, artificial
  human GFAT antisense
gtgggcaatctgcgggctcg

SEQ ID NO: 970 - DNA, 20 bp, artificial
  human GFAT antisense
ggtggctattgacaggactg

SEQ ID NO: 971 - DNA, 20 bp, artificial
  human GFAT antisense
tgggggtggctattgacagg

SEQ ID NO: 972 - DNA, 20 bp, artificial
  human GFAT antisense
tcaagtctttgtagttggtg

SEQ ID NO: 973 - DNA, 20 bp, artificial
  human GFAT antisense
agattcgaagtcatagcctt

SEQ ID NO: 974 - DNA, 20 bp, artificial
  human GFAT antisense
caattgttggataactctct

SEQ ID NO: 975 - DNA, 20 bp, artificial
  human GFAT antisense
gaatcaaacgccggcatctc

SEQ ID NO: 976 - DNA, 20 bp, artificial
  human GFAT antisense
gcaactcagtcagctcctca

SEQ ID NO: 977 - DNA, 20 bp, artificial
  human GFAT antisense
ccatcacaggcaactcagtc

SEQ ID NO: 978 - DNA, 20 bp, artificial
  human GFAT antisense
caccatcacaggcaactcag

SEQ ID NO: 979 - DNA, 20 bp, artificial
  human GFAT antisense
tttctgtccaggaagtcact

SEQ ID NO: 980 - DNA, 20 bp, artificial
  human GFAT antisense
gtgtttctgtccaggaagtc

SEQ ID NO: 981 - DNA, 20 bp, artificial
  human GFAT antisense
ttgcatggagatccgatcat

SEQ ID NO: 982 - DNA, 20 bp, artificial
  human GFAT antisense
tgccccttcaagacaagtag

SEQ ID NO: 983 - DNA, 20 bp, artificial
  human GFAT antisense
acacttggcataagtgtgat

SEQ ID NO: 984 - DNA, 20 bp, artificial
  human GFAT antisense
gacacttggcataagtgtga

SEQ ID NO: 985 - DNA, 20 bp, artificial
  human GFAT antisense
aaaatcacatattgagtgga

SEQ ID NO: 986 - DNA, 20 bp, artificial
  human GFAT antisense
ctttcactggtctgaatgaa

SEQ ID NO: 987 - DNA, 20 bp, artificial
  human GFAT antisense
atttcgcttcctaaatttct

SEQ ID NO: 988 - DNA, 20 bp, artificial
  human GFAT antisense
ttttaggagatgaaaacaca

SEQ ID NO: 989 - DNA, 20 bp, artificial
  human GFAT antisense
gggggtgcacacacgagctt

SEQ ID NO: 990 - DNA, 20 bp, artificial
  human GFAT antisense
atataccacacatgatgccg

SEQ ID NO: 991 - DNA, 20 bp, artificial
  human GFAT antisense
aagcaccttccaattgttgg

SEQ ID NO: 992 - DNA, 20 bp, artificial
  human GFAT antisense
tccactgctttttcttccac

SEQ ID NO: 993 - DNA, 20 bp, artificial
  human GFAT antisense
ctgcataaatgaactgaagt

SEQ ID NO: 994 - DNA, 20 bp, artificial
  human GFAT antisense
agtatagtcatcaaagttga

SEQ ID NO: 995 - DNA, 20 bp, artificial
  human GFAT antisense
ccacccaaattcacagtata

SEQ ID NO: 996 - DNA, 20 bp, artificial
  human GFAT antisense
cacaggcaactcagtcagct

SEQ ID NO: 997 - DNA, 20 bp, artificial
  human GFAT antisense
atgaactccacaatctgtct

SEQ ID NO: 998 - DNA, 20 bp, artificial
  human GFAT antisense
ttaatatgaactccacaatc

SEQ ID NO: 999 - DNA, 20 bp, artificial
  human GFAT antisense
taatcatacagtttcgtaca

SEQ ID NO: 1000 - DNA, 20 bp, artificial
  human GFAT antisense
aacttcacaaaaatcacata

SEQ ID NO: 1001 - DNA, 20 bp, artificial
  human GFAT antisense
taacttcacaaaaatcacat

SEQ ID NO: 1002 - DNA, 20 bp, artificial
  human GFAT antisense
tccctaactgtccaagtatg

SEQ ID NO: 1003 - DNA, 20 bp, artificial
  human GFAT antisense
ccaaagcagcttgaatttaa

SEQ ID NO: 1004 - DNA, 20 bp, artificial
  human GFAT antisense
aagcaaatataccacacatg

SEQ ID NO: 1005 - DNA, 20 bp, artificial
  human GFAT antisense
agtctctgaaggcctttgat

SEQ ID NO: 1006 - DNA, 20 bp, artificial
  human GFAT antisense
cgataaattcattattttta

SEQ ID NO: 1007 - DNA, 20 bp, artificial
  human GFAT antisense
taacgataaattcattattt

SEQ ID NO: 1008 - DNA, 20 bp, artificial
  human GFAT antisense
gtcatacatatacttaacga

SEQ ID NO: 1009 - DNA, 20 bp, artificial
  human GFAT antisense
gttggataactctctccacc

SEQ ID NO: 1010 - DNA, 20 bp, artificial
  human GFAT antisense
tgtgccaactgcttgcccgg

SEQ ID NO: 1011 - DNA, 20 bp, artificial
  human GFAT antisense
agctcgtccggggtgatctc

SEQ ID NO: 1012 - DNA, 20 bp, artificial
  human GFAT antisense
gtgttcacgacagactctgg

SEQ ID NO: 1013 - DNA, 20 bp, artificial
  human GFAT antisense
accagcattaatatgaactc

SEQ ID NO: 1014 - DNA, 20 bp, artificial
  human GFAT antisense
tgatctctttgcgtctttct

SEQ ID NO: 1015 - DNA, 20 bp, artificial
  human GFAT antisense
tcaatccaagcatgatctct

SEQ ID NO: 1016 - DNA, 20 bp, artificial
  human GFAT antisense
aggccgcccctgccgagcaa

SEQ ID NO: 1017 - DNA, 20 bp, artificial
  human GFAT antisense
tgtaaagggatcacgctgag

SEQ ID NO: 1018 - DNA, 20 bp, artificial
  human GFAT antisense
taatagctagaatctttctg

SEQ ID NO: 1019 - DNA, 20 bp, artificial
  human GFAT antisense
aataatagctagaatctttc

SEQ ID NO: 1020 - DNA, 20 bp, artificial
  human GFAT antisense
gaatgaagtatggtgaaaca

SEQ ID NO: 1021 - DNA, 20 bp, artificial
  human GFAT antisense
cggggtggcgccgacacgac

SEQ ID NO: 1022 - DNA, 20 bp, artificial
  human GFAT antisense
ttaagtaagcaaatatacca

SEQ ID NO: 1023 - DNA, 20 bp, artificial
  human GFAT antisense
tttaagtaagcaaatatacc

SEQ ID NO: 1024 - DNA, 20 bp, artificial
  human GFAT antisense
gggtctccaggatttctcgt

SEQ ID NO: 1025 - DNA, 20 bp, artificial
  human GFAT antisense
ttttcctttcttcttaataa

SEQ ID NO: 1026 - DNA, 20 bp, artificial
  human GFAT antisense
aaattcattatttttatcag

SEQ ID NO: 1027 - DNA, 20 bp, artificial
  human GFAT antisense
tctctgtgtctgtttcagat

SEQ ID NO: 1028 - DNA, 20 bp, artificial
  human GFAT antisense
gtagtaaagctggtatcttg

SEQ ID NO: 1029 - DNA, 20 bp, artificial
  human GFAT antisense
taatactccactgctttttc

SEQ ID NO: 1030 - DNA, 20 bp, artificial
  human GFAT antisense
tgatctcctgcagttcgttt

SEQ ID NO: 1031 - DNA, 20 bp, artificial
  human GFAT antisense
ttgtgttcacgacagactct

SEQ ID NO: 1032 - DNA, 20 bp, artificial
  human GFAT antisense
tgttccacaagcaataagaa

SEQ ID NO: 1033 - DNA, 20 bp, artificial
  human GFAT antisense
tgtttctgtccaggaagtca

SEQ ID NO: 1034 - DNA, 20 bp, artificial
  human GFAT antisense
aatcaggcagccgtttcaat

SEQ ID NO: 1035 - DNA, 20 bp, artificial
  human GFAT antisense
ggatgccttcagagtgcata

SEQ ID NO: 1036 - DNA, 20 bp, artificial
  human GFAT antisense
aattaccacaggccgcccct

SEQ ID NO: 1037 - DNA, 20 bp, artificial
  human GFAT antisense
ccattattcaaagtcctcca

SEQ ID NO: 1038 - DNA, 20 bp, artificial
  human GFAT antisense
aagtaccaatttttagaaac

SEQ ID NO: 1039 - DNA, 20 bp, artificial
  human GFAT antisense
tgaaggcctttgattagggt

SEQ ID NO: 1040 - DNA, 20 bp, artificial
  human GFAT antisense
ccttaacttttcctttcttc

SEQ ID NO: 1041 - DNA, 20 bp, artificial
  human GFAT antisense
aaagcaccttccaattgttg

SEQ ID NO: 1042 - DNA, 20 bp, artificial
  human GFAT antisense
tgcaaaagcaccttccaatt

SEQ ID NO: 1043 - DNA, 20 bp, artificial
  human GFAT antisense
gtgcaaaagcaccttccaat

SEQ ID NO: 1044 - DNA, 20 bp, artificial
  human GFAT antisense
aagtaatactccactgcttt

SEQ ID NO: 1045 - DNA, 20 bp, artificial
  human GFAT antisense
agaaagacgtccatccacta

SEQ ID NO: 1046 - DNA, 20 bp, artificial
  human GFAT antisense
tccatctggagtgtttgcac

SEQ ID NO: 1047 - DNA, 20 bp, artificial
  human GFAT antisense
tgtgttcacgacagactctg

SEQ ID NO: 1048 - DNA, 20 bp, artificial
  human GFAT antisense
agaatcaaacgccggcatct

SEQ ID NO: 1049 - DNA, 20 bp, artificial
  human GFAT antisense
aactccacaatctgtctccc

SEQ ID NO: 1050 - DNA, 20 bp, artificial
  human GFAT antisense
agtttctgaatttcgtcatc

SEQ ID NO: 1051 - DNA, 20 bp, artificial
  human GFAT antisense
cttctgatgataaagttctg

SEQ ID NO: 1052 - DNA, 20 bp, artificial
  human GFAT antisense
agcaaggatgccttcagagt

SEQ ID NO: 1053 - DNA, 20 bp, artificial
  human GFAT antisense
atcacaaattaccacaggcc

SEQ ID NO: 1054 - DNA, 20 bp, artificial
  human GFAT antisense
tcttccacctacagataata

SEQ ID NO: 1055 - DNA, 20 bp, artificial
  human GFAT antisense
gtagtaggatacccaacatg

SEQ ID NO: 1056 - DNA, 20 bp, artificial
  human GFAT antisense
ttagggtctccaggatttct

SEQ ID NO: 1057 - DNA, 20 bp, artificial
  human GFAT antisense
ttaacttttcctttcttctt

SEQ ID NO: 1058 - DNA, 20 bp, artificial
  human GFAT antisense
tgtgttgcccaacgggtatg

SEQ ID NO: 1059 - DNA, 20 bp, artificial
  human GFAT antisense
aacgataaattcattatttt

SEQ ID NO: 1060 - DNA, 20 bp, artificial
  human GFAT antisense
caaaagcaccttccaattgt

SEQ ID NO: 1061 - DNA, 20 bp, artificial
  human GFAT antisense
tgccaactgcttgcccggga

SEQ ID NO: 1062 - DNA, 20 bp, artificial
  human GFAT antisense
aacagagggctacctcgcct

SEQ ID NO: 1063 - DNA, 20 bp, artificial
  human GFAT antisense
ctggagtgtttgcacagctc

SEQ ID NO: 1064 - DNA, 20 bp, artificial
  human GFAT antisense
cattgtgttcacgacagact

SEQ ID NO: 1065 - DNA, 20 bp, artificial
  human GFAT antisense
gttccaccatcacaggcaac

SEQ ID NO: 1066 - DNA, 20 bp, artificial
  human GFAT antisense
atggagatccgatcatcaca

SEQ ID NO: 1067 - DNA, 20 bp, artificial
  human GFAT antisense
caatccaagcatgatctctt

SEQ ID NO: 1068 - DNA, 20 bp, artificial
  human GFAT antisense
gcataatgatagcctcgtcc

SEQ ID NO: 1069 - DNA, 20 bp, artificial
  human GFAT antisense
ccgcccctgccgagcaacca

SEQ ID NO: 1070 - DNA, 20 bp, artificial
  human GFAT antisense
attaccacaggccgcccctg

SEQ ID NO: 1071 - DNA, 20 bp, artificial
  human GFAT antisense
gtaaagggatcacgctgaga

SEQ ID NO: 1072 - DNA, 20 bp, artificial
  human GFAT antisense
ccaatttttagaaacatatt

SEQ ID NO: 1073 - DNA, 20 bp, artificial
  human GFAT antisense
aactgtccaagtatgagcat

SEQ ID NO: 1074 - DNA, 20 bp, artificial
  human GFAT antisense
cagatacaaggaaataaaaa

SEQ ID NO: 1075 - DNA, 20 bp, artificial
  human GFAT antisense
gcagctctgtgttgtgattt

SEQ ID NO: 1076 - DNA, 20 bp, artificial
  human GFAT antisense
acacgagcttcggtgggcaa

SEQ ID NO: 1077 - DNA, 20 bp, artificial
  human GFAT antisense
gggtgcacacacgagcttcg

SEQ ID NO: 1078 - DNA, 20 bp, artificial
  human GFAT antisense
cctctgtactccagtctctg

SEQ ID NO: 1079 - DNA, 20 bp, artificial
  human GFAT antisense
tgcccaacgggtatgagcta

SEQ ID NO: 1080 - DNA, 20 bp, artificial
  human GFAT antisense
agtctttgtagttggtgatg

SEQ ID NO: 1081 - DNA, 20 bp, artificial
  human GFAT antisense
gactttcccgattgtcatac

SEQ ID NO: 1082 - DNA, 20 bp, artificial
  human GFAT antisense
caaagtaatactccactgct

SEQ ID NO: 1083 - DNA, 20 bp, artificial
  human GFAT antisense
tggatagaaagacgtccatc

SEQ ID NO: 1084 - DNA, 20 bp, artificial
  human GFAT antisense
tcacaggcaactcagtcagc

SEQ ID NO: 1085 - DNA, 20 bp, artificial
  human GFAT antisense
tgccaactgtgtttgtgatc

SEQ ID NO: 1086 - DNA, 20 bp, artificial
  human GFAT antisense
tcaagacaagtagcataatg

SEQ ID NO: 1087 - DNA, 20 bp, artificial
  human GFAT antisense
ctccttatcacaaattacca

SEQ ID NO: 1088 - DNA, 20 bp, artificial
  human GFAT antisense
atattgagtggaataattat

SEQ ID NO: 1089 - DNA, 20 bp, artificial
  human GFAT antisense
aaaaatcacatattgagtgg

SEQ ID NO: 1090 - DNA, 20 bp, artificial
  human GFAT antisense
aaagtcctccacaaattact

SEQ ID NO: 1091 - DNA, 20 bp, artificial
  human GFAT antisense
ttctcagattgaagtggagg

SEQ ID NO: 1092 - DNA, 20 bp, artificial
  human GFAT antisense
ctgtccaagtatgagcatac

SEQ ID NO: 1093 - DNA, 20 bp, artificial
  human GFAT antisense
aataaatcacatcttctctt

SEQ ID NO: 1094 - DNA, 20 bp, artificial
  human GFAT antisense
tttcagttttaagttttaca

SEQ ID NO: 1095 - DNA, 20 bp, artificial
  human GFAT antisense
tacaaggaaataaaaaacac

SEQ ID NO: 1096 - DNA, 20 bp, artificial
  human GFAT antisense
ggagacacggcccgcgaggc

SEQ ID NO: 1097 - DNA, 20 bp, artificial
  human GFAT antisense
caaatataccacacatgatg

SEQ ID NO: 1098 - DNA, 20 bp, artificial
  human GFAT antisense
taagtaagcaaatataccac

SEQ ID NO: 1099 - DNA, 20 bp, artificial
  human GFAT antisense
atcattgcctccatcaaatc

SEQ ID NO: 1100 - DNA, 20 bp, artificial
  human GFAT antisense
tctccaccaaggtagtaaag

SEQ ID NO: 1101 - DNA, 20 bp, artificial
  human GFAT antisense
ttggataactctctccacca

SEQ ID NO: 1102 - DNA, 20 bp, artificial
  human GFAT antisense
tccaattgttggataactct

SEQ ID NO: 1103 - DNA, 20 bp, artificial
  human GFAT antisense
atgtgatcagtagaaagttt

SEQ ID NO: 1104 - DNA, 20 bp, artificial
  human GFAT antisense
ctcctgcagttcgtttaatt

SEQ ID NO: 1105 - DNA, 20 bp, artificial
  human GFAT antisense
cttcaagacaagtagcataa

SEQ ID NO: 1106 - DNA, 20 bp, artificial
  human GFAT antisense
ttctgacacttggcataagt

SEQ ID NO: 1107 - DNA, 20 bp, artificial
  human GFAT antisense
gattccgtgggaaatcaaca

SEQ ID NO: 1108 - DNA, 20 bp, artificial
  human GFAT antisense
aacaagtaccaatttttaga

SEQ ID NO: 1109 - DNA, 20 bp, artificial
  human GFAT antisense
aatgcactactctttcactg

SEQ ID NO: 1110 - DNA, 20 bp, artificial
  human GFAT antisense
aacacttttaggagatgaaa

SEQ ID NO: 1111 - DNA, 20 bp, artificial
  human GFAT antisense
aaacacttttaggagatgaa

SEQ ID NO: 1112 - DNA, 20 bp, artificial
  human GFAT antisense
aaaacacttttaggagatga

SEQ ID NO: 1113 - DNA, 20 bp, artificial
  human GFAT antisense
aaatataccacacatgatgc

SEQ ID NO: 1114 - DNA, 20 bp, artificial
  human GFAT antisense
agtaagcaaatataccacac

SEQ ID NO: 1115 - DNA, 20 bp, artificial
  human GFAT antisense
tatcattgcctccatcaaat

SEQ ID NO: 1116 - DNA, 20 bp, artificial
  human GFAT antisense
tgtcatacatatacttaacg

SEQ ID NO: 1117 - DNA, 20 bp, artificial
  human GFAT antisense
agctggtatcttgactttcc

SEQ ID NO: 1118 - DNA, 20 bp, artificial
  human GFAT antisense
agattgcagcttcctttctt

SEQ ID NO: 1119 - DNA, 20 bp, artificial
  human GFAT antisense
atcttccagaaagatgacgc

SEQ ID NO: 1120 - DNA, 20 bp, artificial
  human GFAT antisense
ggctgctcaaatatttcctt

SEQ ID NO: 1121 - DNA, 20 bp, artificial
  human GFAT antisense
tgtttgtgatccccacagtt

SEQ ID NO: 1122 - DNA, 20 bp, artificial
  human GFAT antisense
taatatgaactccacaatct

SEQ ID NO: 1123 - DNA, 20 bp, artificial
  human GFAT antisense
gcattaatatgaactccaca

SEQ ID NO: 1124 - DNA, 20 bp, artificial
  human GFAT antisense
gcaaggatgccttcagagtg

SEQ ID NO: 1125 - DNA, 20 bp, artificial
  human GFAT antisense
atgatcacaggcatcaattt

SEQ ID NO: 1126 - DNA, 20 bp, artificial
  human GFAT antisense
ttaccacaggccgcccctgc

SEQ ID NO: 1127 - DNA, 20 bp, artificial
  human GFAT antisense
tccacaaattactgggaaaa

SEQ ID NO: 1128 - DNA, 20 bp, artificial
  human GFAT antisense
cagttttaagttttacagtt

SEQ ID NO: 1129 - DNA, 20 bp, artificial
  human GFAT antisense
tttaggagatgaaaacacaa

SEQ ID NO: 1130 - DNA, 20 bp, artificial
  human GFAT antisense
agcagctctgtgttgtgatt

SEQ ID NO: 1131 - DNA, 20 bp, artificial
  human GFAT antisense
agcagaatcatatcctctgt

SEQ ID NO: 1132 - DNA, 20 bp, artificial
  human GFAT antisense
taacttttcctttcttctta

SEQ ID NO: 1133 - DNA, 20 bp, artificial
  human GFAT antisense
tggtatcttgactttcccga

SEQ ID NO: 1134 - DNA, 20 bp, artificial
  human GFAT antisense
aagcaaagtaatactccact

SEQ ID NO: 1135 - DNA, 20 bp, artificial
  human GFAT antisense
gcataaatgaactgaagttg

SEQ ID NO: 1136 - DNA, 20 bp, artificial
  human GFAT antisense
tgcataaatgaactgaagtt

SEQ ID NO: 1137 - DNA, 20 bp, artificial
  human GFAT antisense
tctgcataaatgaactgaag

SEQ ID NO: 1138 - DNA, 20 bp, artificial
  human GFAT antisense
tggctgctcaaatatttcct

SEQ ID NO: 1139 - DNA, 20 bp, artificial
  human GFAT antisense
ctggctgctcaaatatttcc

SEQ ID NO: 1140 - DNA, 20 bp, artificial
  human GFAT antisense
agactggtgtgtttctgtcc

SEQ ID NO: 1141 - DNA, 20 bp, artificial
  human GFAT antisense
caatttatccaccaaagcca

SEQ ID NO: 1142 - DNA, 20 bp, artificial
  human GFAT antisense
tattgagtggaataattata

SEQ ID NO: 1143 - DNA, 20 bp, artificial
  human GFAT antisense
actgggaaaatgtaagaggt

SEQ ID NO: 1144 - DNA, 20 bp, artificial
  human GFAT antisense
aaggaaataaaaaacacttt

SEQ ID NO: 1145 - DNA, 20 bp, artificial
  human GFAT antisense
gcttcggtgggcaatctgcg

SEQ ID NO: 1146 - DNA, 20 bp, artificial
  human GFAT antisense
ggtgcacacacgagcttcgg

SEQ ID NO: 1147 - DNA, 20 bp, artificial
  human GFAT antisense
tctcgttcgaggaacatggt

SEQ ID NO: 1148 - DNA, 20 bp, artificial
  human GFAT antisense
aatctttatcattgcctcca

SEQ ID NO: 1149 - DNA, 20 bp, artificial
  human GFAT antisense
tgccttaacttttcctttct

SEQ ID NO: 1150 - DNA, 20 bp, artificial
  human GFAT antisense
ataacgataaattcattatt

SEQ ID NO: 1151 - DNA, 20 bp, artificial
  human GFAT antisense
tttcaagtctttgtagttgg

SEQ ID NO: 1152 - DNA, 20 bp, artificial
  human GFAT antisense
tcgccttgtgccaactgctt

SEQ ID NO: 1153 - DNA, 20 bp, artificial
  human GFAT antisense
acaggcaactcagtcagctc

SEQ ID NO: 1154 - DNA, 20 bp, artificial
  human GFAT antisense
ggtgtgtttctgtccaggaa

SEQ ID NO: 1155 - DNA, 20 bp, artificial
  human GFAT antisense
cagaactgacttctgatgat

SEQ ID NO: 1156 - DNA, 20 bp, artificial
  human GFAT antisense
atttggcaagattccgtggg

SEQ ID NO: 1157 - DNA, 20 bp, artificial
  human GFAT antisense
tttcactggtctgaatgaag

SEQ ID NO: 1158 - DNA, 20 bp, artificial
  human GFAT antisense
tacagtttgatttaaaaaca

SEQ ID NO: 1159 - DNA, 20 bp, artificial
  human GFAT antisense
cattcagcagtcatttaaaa

SEQ ID NO: 1160 - DNA, 20 bp, artificial
  human GFAT antisense
taaattcattatttttatca

SEQ ID NO: 1161 - DNA, 20 bp, artificial
  human GFAT antisense
ttgtgaataacgataaattc

SEQ ID NO: 1162 - DNA, 20 bp, artificial
  human GFAT antisense
atagcctttgctttccaaaa

SEQ ID NO: 1163 - DNA, 20 bp, artificial
  human GFAT antisense
aaaagcaccttccaattgtt

SEQ ID NO: 1164 - DNA, 20 bp, artificial
  human GFAT antisense
aattcacagtatagtcatca

SEQ ID NO: 1165 - DNA, 20 bp, artificial
  human GFAT antisense
gttccacaagcaataagaat

SEQ ID NO: 1166 - DNA, 20 bp, artificial
  human GFAT antisense
gtataagcctttgtactggc

SEQ ID NO: 1167 - DNA, 20 bp, artificial
  human GFAT antisense
catcataagggcaaacatca

SEQ ID NO: 1168 - DNA, 20 bp, artificial
  human GFAT antisense
ttctgatgataaagttctgt

SEQ ID NO: 1169 - DNA, 20 bp, artificial
  human GFAT antisense
tcagtgccccttcaagacaa

SEQ ID NO: 1170 - DNA, 20 bp, artificial
  human GFAT antisense
gcatcaatttatccaccaaa

SEQ ID NO: 1171 - DNA, 20 bp, artificial
  human GFAT antisense
atgatgatcatgatcacagg

SEQ ID NO: 1172 - DNA, 20 bp, artificial
  human GFAT antisense
taatagcagctctgtgttgt

SEQ ID NO: 1173 - DNA, 20 bp, artificial
  human GFAT antisense
gccaggggcgagtggctggc

SEQ ID NO: 1174 - DNA, 20 bp, artificial
  human GFAT antisense
gtagtttaagtaagcaaata

SEQ ID NO: 1175 - DNA, 20 bp, artificial
  human GFAT antisense
gaacatggtagtttaagtaa

SEQ ID NO: 1176 - DNA, 20 bp, artificial
  human GFAT antisense
tcattgcctccatcaaatcc

SEQ ID NO: 1177 - DNA, 20 bp, artificial
  human GFAT antisense
tgattccattgtgaataacg

SEQ ID NO: 1178 - DNA, 20 bp, artificial
  human GFAT antisense
ctttttcaagtctttgtagt

SEQ ID NO: 1179 - DNA, 20 bp, artificial
  human GFAT antisense
gctttccaaaaactttttca

SEQ ID NO: 1180 - DNA, 20 bp, artificial
  human GFAT antisense
agtgcaaaagcaccttccaa

SEQ ID NO: 1181 - DNA, 20 bp, artificial
  human GFAT antisense
tgtgatcagtagaaagttta

SEQ ID NO: 1182 - DNA, 20 bp, artificial
  human GFAT antisense
aaagtaatactccactgctt

SEQ ID NO: 1183 - DNA, 20 bp, artificial
  human GFAT antisense
attgtgttcacgacagactc

SEQ ID NO: 1184 - DNA, 20 bp, artificial
  human GFAT antisense
aaccacccaaattcacagta

SEQ ID NO: 1185 - DNA, 20 bp, artificial
  human GFAT antisense
cattaatatgaactccacaa

SEQ ID NO: 1186 - DNA, 20 bp, artificial
  human GFAT antisense
ctcaggaccagcattaatat

SEQ ID NO: 1187 - DNA, 20 bp, artificial
  human GFAT antisense
tcaccagcaaggatgccttc

SEQ ID NO: 1188 - DNA, 20 bp, artificial
  human GFAT antisense
caggccgcccctgccgagca

SEQ ID NO: 1189 - DNA, 20 bp, artificial
  human GFAT antisense
tattgtcttctcagattgaa

SEQ ID NO: 1190 - DNA, 20 bp, artificial
  human GFAT antisense
agtatggtgaaacaagtacc

SEQ ID NO: 1191 - DNA, 20 bp, artificial
  human GFAT antisense
tgccactggctttagatact

SEQ ID NO: 1192 - DNA, 20 bp, artificial
  human GFAT antisense
atatttcgcttcctaaattt

SEQ ID NO: 1193 - DNA, 20 bp, artificial
  human GFAT antisense
gtaatatttcgcttcctaaa

SEQ ID NO: 1194 - DNA, 20 bp, artificial
  human GFAT antisense
aatttaaagtttgtgctata

SEQ ID NO: 1195 - DNA, 20 bp, artificial
  human GFAT antisense
acacttttaggagatgaaaa

SEQ ID NO: 1196 - DNA, 20 bp, artificial
  human GFAT antisense
agtttaagtaagcaaatata

SEQ ID NO: 1197 - DNA, 20 bp, artificial
  human GFAT antisense
ccagcagaatcatatcctct

SEQ ID NO: 1198 - DNA, 20 bp, artificial
  human GFAT antisense
tttttcaagtctttgtagtt

SEQ ID NO: 1199 - DNA, 20 bp, artificial
  human GFAT antisense
gcaattgtctctgtgtctgt

SEQ ID NO: 1200 - DNA, 20 bp, artificial
  human GFAT antisense
aacgagcttggcaattgtct

SEQ ID NO: 1201 - DNA, 20 bp, artificial
  human GFAT antisense
gattggtgtgttctatgaca

SEQ ID NO: 1202 - DNA, 20 bp, artificial
  human GFAT antisense
ctgcagttcgtttaattcga

SEQ ID NO: 1203 - DNA, 20 bp, artificial
  human GFAT antisense
tctggagtgtttgcacagct

SEQ ID NO: 1204 - DNA, 20 bp, artificial
  human GFAT antisense
ctctctccttacagtaacga

SEQ ID NO: 1205 - DNA, 20 bp, artificial
  human GFAT antisense
gtttctgaatttcgtcatcc

SEQ ID NO: 1206 - DNA, 20 bp, artificial
  human GFAT antisense
aagacaagtagcataatgat

SEQ ID NO: 1207 - DNA, 20 bp, artificial
  human GFAT antisense
attccgtgggaaatcaacat

SEQ ID NO: 1208 - DNA, 20 bp, artificial
  human GFAT antisense
aaggatttactaaaaaaagg

SEQ ID NO: 1209 - DNA, 20 bp, artificial
  human GFAT antisense
attgagtggaataattataa

SEQ ID NO: 1210 - DNA, 20 bp, artificial
  human GFAT antisense
ttcacaaaaatcacatattg

SEQ ID NO: 1211 - DNA, 20 bp, artificial
  human GFAT antisense
aaacatattgtcttctcaga

SEQ ID NO: 1212 - DNA, 20 bp, artificial
  human GFAT antisense
actgtccaagtatgagcata

SEQ ID NO: 1213 - DNA, 20 bp, artificial
  human GFAT antisense
gcaaacccttccctaactgt

SEQ ID NO: 1214 - DNA, 20 bp, artificial
  human GFAT antisense
atcctaccaataaaattttt

SEQ ID NO: 1215 - DNA, 20 bp, artificial
  human GFAT antisense
caaagcagcttgaatttaaa

SEQ ID NO: 1216 - DNA, 20 bp, artificial
  human GFAT antisense
ggagatgaaaacacaaagta

SEQ ID NO: 1217 - DNA, 20 bp, artificial
  human GFAT antisense
gcaatctgcgggctcggggg

SEQ ID NO: 1218 - DNA, 20 bp, artificial
  human GFAT antisense
ggaacatggtagtttaagta

SEQ ID NO: 1219 - DNA, 20 bp, artificial
  human GFAT antisense
cagtctctgaaggcctttga

SEQ ID NO: 1220 - DNA, 20 bp, artificial
  human GFAT antisense
ctattgacaggactgggttc

SEQ ID NO: 1221 - DNA, 20 bp, artificial
  human GFAT antisense
accaaggtagtaaagctggt

SEQ ID NO: 1222 - DNA, 20 bp, artificial
  human GFAT antisense
gtgatcagtagaaagtttat

SEQ ID NO: 1223 - DNA, 20 bp, artificial
  human GFAT antisense
ttcttgtctttgcctgttct

SEQ ID NO: 1224 - DNA, 20 bp, artificial
  human GFAT antisense
agcttcctttcttgtctttg

SEQ ID NO: 1225 - DNA, 20 bp, artificial
  human GFAT antisense
tcattgtgttcacgacagac

SEQ ID NO: 1226 - DNA, 20 bp, artificial
  human GFAT antisense
caccaatctcaggaccagca

SEQ ID NO: 1227 - DNA, 20 bp, artificial
  human GFAT antisense
gtttcaatccaagcatgatc

SEQ ID NO: 1228 - DNA, 20 bp, artificial
  human GFAT antisense
tgttgctagtttctgaattt

SEQ ID NO: 1229 - DNA, 20 bp, artificial
  human GFAT antisense
caggcatcaatttatccacc

SEQ ID NO: 1230 - DNA, 20 bp, artificial
  human GFAT antisense
ttctttttgtgttcttaatg

SEQ ID NO: 1231 - DNA, 20 bp, artificial
  human GFAT antisense
ctgggaaaatgtaagaggta

SEQ ID NO: 1232 - DNA, 20 bp, artificial
  human GFAT antisense
ctccacaaattactgggaaa

SEQ ID NO: 1233 - DNA, 20 bp, artificial
  human GFAT antisense
aaatgcactactctttcact

SEQ ID NO: 1234 - DNA, 20 bp, artificial
  human GFAT antisense
aattaaatgcactactcttt

SEQ ID NO: 1235 - DNA, 20 bp, artificial
  human GFAT antisense
tccaattaaatgcactactc

SEQ ID NO: 1236 - DNA, 20 bp, artificial
  human GFAT antisense
aaataaatcacatcttctct

SEQ ID NO: 1237 - DNA, 20 bp, artificial
  human GFAT antisense
tagcagctctgtgttgtgat

SEQ ID NO: 1238 - DNA, 20 bp, artificial
  human GFAT antisense
ctattccaaggtgtacatca

SEQ ID NO: 1239 - DNA, 20 bp, artificial
  human GFAT antisense
tgtgaataacgataaattca

SEQ ID NO: 1240 - DNA, 20 bp, artificial
  human GFAT antisense
tttcagattcgaagtcatag

SEQ ID NO: 1241 - DNA, 20 bp, artificial
  human GFAT antisense
gtgctgtccacacgagagag

SEQ ID NO: 1242 - DNA, 20 bp, artificial
  human GFAT antisense
tcagaagcaaagtaatactc

SEQ ID NO: 1243 - DNA, 20 bp, artificial
  human GFAT antisense
atgacgcgattggtgtgttc

SEQ ID NO: 1244 - DNA, 20 bp, artificial
  human GFAT antisense
atcatcatcttccagaaaga

SEQ ID NO: 1245 - DNA, 20 bp, artificial
  human GFAT antisense
gtttgtgatccccacagtta

SEQ ID NO: 1246 - DNA, 20 bp, artificial
  human GFAT antisense
ttcttgcatggagatccgat

SEQ ID NO: 1247 - DNA, 20 bp, artificial
  human GFAT antisense
gatctctttgcgtctttctt

SEQ ID NO: 1248 - DNA, 20 bp, artificial
  human GFAT antisense
gtagcataatgatagcctcg

SEQ ID NO: 1249 - DNA, 20 bp, artificial
  human GFAT antisense
agtagcataatgatagcctc

SEQ ID NO: 1250 - DNA, 20 bp, artificial
  human GFAT antisense
aaatcacatattgagtggaa

SEQ ID NO: 1251 - DNA, 20 bp, artificial
  human GFAT antisense
tcacatcttctcttaaaact

SEQ ID NO: 1252 - DNA, 20 bp, artificial
  human GFAT antisense
ttcgcttcctaaatttcttc

SEQ ID NO: 1253 - DNA, 20 bp, artificial
  human GFAT antisense
cttttaggagatgaaaacac

SEQ ID NO: 1254 - DNA, 20 bp, artificial
  human GFAT antisense
cggagacacggcccgcgagg

SEQ ID NO: 1255 - DNA, 20 bp, artificial
  human GFAT antisense
acgagagagattgcagcttc

SEQ ID NO: 1256 - DNA, 20 bp, artificial
  human GFAT antisense
cacacgagagagattgcagc

SEQ ID NO: 1257 - DNA, 20 bp, artificial
  human GFAT antisense
gttgtgctgtccacacgaga

SEQ ID NO: 1258 - DNA, 20 bp, artificial
  human GFAT antisense
gctgctcaaatatttccttc

SEQ ID NO: 1259 - DNA, 20 bp, artificial
  human GFAT antisense
aggcaactcagtcagctcct

SEQ ID NO: 1260 - DNA, 20 bp, artificial
  human GFAT antisense
tttgtgatccccacagttaa

SEQ ID NO: 1261 - DNA, 20 bp, artificial
  human GFAT antisense
tcatgatgatcatgatcaca

SEQ ID NO: 1262 - DNA, 20 bp, artificial
  human GFAT antisense
accaatttttagaaacatat

SEQ ID NO: 1263 - DNA, 20 bp, artificial
  human GFAT antisense
aatttcttccacctacagat

SEQ ID NO: 1264 - DNA, 20 bp, artificial
  human GFAT antisense
aaagcagcttgaatttaaag

SEQ ID NO: 1265 - DNA, 20 bp, artificial
  human GFAT antisense
aaatcatattgtcagttgtc

SEQ ID NO: 1266 - DNA, 20 bp, artificial
  human GFAT antisense
ttaggagatgaaaacacaaa

SEQ ID NO: 1267 - DNA, 20 bp, artificial
  human GFAT antisense
ggtagtttaagtaagcaaat

SEQ ID NO: 1268 - DNA, 20 bp, artificial
  human GFAT antisense
tcgaggaacatggtagttta

SEQ ID NO: 1269 - DNA, 20 bp, artificial
  human GFAT antisense
tatcttgttgcttgtgaact

SEQ ID NO: 1270 - DNA, 20 bp, artificial
  human GFAT antisense
gtgaataacgataaattcat

SEQ ID NO: 1271 - DNA, 20 bp, artificial
  human GFAT antisense
ctccaccaaggtagtaaagc

SEQ ID NO: 1272 - DNA, 20 bp, artificial
  human GFAT antisense
catcatcatcttccagaaag

SEQ ID NO: 1273 - DNA, 20 bp, artificial
  human GFAT antisense
ctcattgtgttcacgacaga

SEQ ID NO: 1274 - DNA, 20 bp, artificial
  human GFAT antisense
ggcaactcagtcagctcctc

SEQ ID NO: 1275 - DNA, 20 bp, artificial
  human GFAT antisense
gaactgacttctgatgataa

SEQ ID NO: 1276 - DNA, 20 bp, artificial
  human GFAT antisense
tcagaactgacttctgatga

SEQ ID NO: 1277 - DNA, 20 bp, artificial
  human GFAT antisense
ccattatcagaactgacttc

SEQ ID NO: 1278 - DNA, 20 bp, artificial
  human GFAT antisense
catgatgatcatgatcacag

SEQ ID NO: 1279 - DNA, 20 bp, artificial
  human GFAT antisense
cttgatcgttctttttgtgt

SEQ ID NO: 1280 - DNA, 20 bp, artificial
  human GFAT antisense
taaggatttactaaaaaaag

SEQ ID NO: 1281 - DNA, 20 bp, artificial
  human GFAT antisense
ataaggatttactaaaaaaa

SEQ ID NO: 1282 - DNA, 20 bp, artificial
  human GFAT antisense
aataaggatttactaaaaaa

SEQ ID NO: 1283 - DNA, 20 bp, artificial
  human GFAT antisense
tgagtggaataattataact

SEQ ID NO: 1284 - DNA, 20 bp, artificial
  human GFAT antisense
aacatggtagtttaagtaag

SEQ ID NO: 1285 - DNA, 20 bp, artificial
  human GFAT antisense
gccttaacttttcctttctt

SEQ ID NO: 1286 - DNA, 20 bp, artificial
  human GFAT antisense
atatcttgttgcttgtgaac

SEQ ID NO: 1287 - DNA, 20 bp, artificial
  human GFAT antisense
gccttgtgccaactgcttgc

SEQ ID NO: 1288 - DNA, 20 bp, artificial
  human GFAT antisense
acgtccatccactactgctg

SEQ ID NO: 1289 - DNA, 20 bp, artificial
  human GFAT antisense
ccttctgcataaatgaactg

SEQ ID NO: 1290 - DNA, 20 bp, artificial
  human GFAT antisense
ccaaattcacagtatagtca

SEQ ID NO: 1291 - DNA, 20 bp, artificial
  human GFAT antisense
tacagtaacgaagacccatc

SEQ ID NO: 1292 - DNA, 20 bp, artificial
  human GFAT antisense
actccacaatctgtctcccg

SEQ ID NO: 1293 - DNA, 20 bp, artificial
  human GFAT antisense
ataagggcaaacatcacaag

SEQ ID NO: 1294 - DNA, 20 bp, artificial
  human GFAT antisense
tcttgcatggagatccgatc

SEQ ID NO: 1295 - DNA, 20 bp, artificial
  human GFAT antisense
ctctttgcgtctttcttgca

SEQ ID NO: 1296 - DNA, 20 bp, artificial
  human GFAT antisense
aaatcaggcagccgtttcaa

SEQ ID NO: 1297 - DNA, 20 bp, artificial
  human GFAT antisense
attctgacacttggcataag

SEQ ID NO: 1298 - DNA, 20 bp, artificial
  human GFAT antisense
agattccgtgggaaatcaac

SEQ ID NO: 1299 - DNA, 20 bp, artificial
  human GFAT antisense
actgatatataaataaggat

SEQ ID NO: 1300 - DNA, 20 bp, artificial
  human GFAT antisense
ttgagtggaataattataac

SEQ ID NO: 1301 - DNA, 20 bp, artificial
  human GFAT antisense
aatagctagaatctttctga

SEQ ID NO: 1302 - DNA, 20 bp, artificial
  human GFAT antisense
taccaatttttagaaacata

SEQ ID NO: 1303 - DNA, 20 bp, artificial
  human GFAT antisense
tctgaatgaagtatggtgaa

SEQ ID NO: 1304 - DNA, 20 bp, artificial
  human GFAT antisense
aagtatgagcatacactgcc

SEQ ID NO: 1305 - DNA, 20 bp, artificial
  human GFAT antisense
tttaaaatcatattgtcagt

SEQ ID NO: 1306 - DNA, 20 bp, artificial
  human GFAT antisense
aggaaataaaaaacactttt

SEQ ID NO: 1307 - DNA, 20 bp, artificial
  human GFAT antisense
atagcagctctgtgttgtga

SEQ ID NO: 1308 - DNA, 20 bp, artificial
  human GFAT antisense
tagtttaagtaagcaaatat

SEQ ID NO: 1309 - DNA, 20 bp, artificial
  human GFAT antisense
aatcatatcctctgtactcc

SEQ ID NO: 1310 - DNA, 20 bp, artificial
  human GFAT antisense
cttttcctttcttcttaata

SEQ ID NO: 1311 - DNA, 20 bp, artificial
  human GFAT antisense
tgctttccaaaaactttttc

SEQ ID NO: 1312 - DNA, 20 bp, artificial
  human GFAT antisense
tcatcatcttccagaaagat

SEQ ID NO: 1313 - DNA, 20 bp, artificial
  human GFAT antisense
gtttgcacagctcgtccggg

SEQ ID NO: 1314 - DNA, 20 bp, artificial
  human GFAT antisense
atctggagtgtttgcacagc

SEQ ID NO: 1315 - DNA, 20 bp, artificial
  human GFAT antisense
tgctcaaatatttccttctg

SEQ ID NO: 1316 - DNA, 20 bp, artificial
  human GFAT antisense
ttccacaagcaataagaatc

SEQ ID NO: 1317 - DNA, 20 bp, artificial
  human GFAT antisense
cttgttccacaagcaataag

SEQ ID NO: 1318 - DNA, 20 bp, artificial
  human GFAT antisense
acaccaatctcaggaccagc

SEQ ID NO: 1319 - DNA, 20 bp, artificial
  human GFAT antisense
ccacaccaatctcaggacca

SEQ ID NO: 1320 - DNA, 20 bp, artificial
  human GFAT antisense
gatctctcatgatgatcatg

SEQ ID NO: 1321 - DNA, 20 bp, artificial
  human GFAT antisense
tatcacaaattaccacaggc

SEQ ID NO: 1322 - DNA, 20 bp, artificial
  human GFAT antisense
cacagatttggcaagattcc

SEQ ID NO: 1323 - DNA, 20 bp, artificial
  human GFAT antisense
ctgatatataaataaggatt

SEQ ID NO: 1324 - DNA, 20 bp, artificial
  human GFAT antisense
cctaactgtccaagtatgag

SEQ ID NO: 1325 - DNA, 20 bp, artificial
  human GFAT antisense
cttagatataaatcctacca

SEQ ID NO: 1326 - DNA, 20 bp, artificial
  human GFAT antisense
caatattaatttaatagcag

SEQ ID NO: 1327 - DNA, 20 bp, artificial
  human GFAT antisense
ggcaatctgcgggctcgggg

SEQ ID NO: 1328 - DNA, 20 bp, artificial
  human GFAT antisense
acacatgatgccggagacac

SEQ ID NO: 1329 - DNA, 20 bp, artificial
  human GFAT antisense
atcatatcctctgtactcca

SEQ ID NO: 1330 - DNA, 20 bp, artificial
  human GFAT antisense
ccgattgtcatacatatact

SEQ ID NO: 1331 - DNA, 20 bp, artificial
  human GFAT antisense
gtaaagctggtatcttgact

SEQ ID NO: 1332 - DNA, 20 bp, artificial
  human GFAT antisense
attgttggataactctctcc

SEQ ID NO: 1333 - DNA, 20 bp, artificial
  human GFAT antisense
cttgtgccaactgcttgccc

SEQ ID NO: 1334 - DNA, 20 bp, artificial
  human GFAT antisense
aagaatcaaacgccggcatc

SEQ ID NO: 1335 - DNA, 20 bp, artificial
  human GFAT antisense
tttcttgcatggagatccga

SEQ ID NO: 1336 - DNA, 20 bp, artificial
  human GFAT antisense
tccaagcatgatctctttgc

SEQ ID NO: 1337 - DNA, 20 bp, artificial
  human GFAT antisense
gtgcatataagtaatttctt

SEQ ID NO: 1338 - DNA, 20 bp, artificial
  human GFAT antisense
ttcaattcaccagcaaggat

SEQ ID NO: 1339 - DNA, 20 bp, artificial
  human GFAT antisense
cagcaactgtaaagggatca

SEQ ID NO: 1340 - DNA, 20 bp, artificial
  human GFAT antisense
aaagccagcaactgtaaagg

SEQ ID NO: 1341 - DNA, 20 bp, artificial
  human GFAT antisense
aaatcaaggttttaaataca

SEQ ID NO: 1342 - DNA, 20 bp, artificial
  human GFAT antisense
taaatcaaggttttaaatac

SEQ ID NO: 1343 - DNA, 20 bp, artificial
  human GFAT antisense
caatttttagaaacatattg

SEQ ID NO: 1344 - DNA, 20 bp, artificial
  human GFAT antisense
atcacatcttctcttaaaac

SEQ ID NO: 1345 - DNA, 20 bp, artificial
  human GFAT antisense
atttcttccacctacagata

SEQ ID NO: 1346 - DNA, 20 bp, artificial
  human GFAT antisense
aatatttcgcttcctaaatt

SEQ ID NO: 1347 - DNA, 20 bp, artificial
  human GFAT antisense
acttttcctttcttcttaat

SEQ ID NO: 1348 - DNA, 20 bp, artificial
  human GFAT antisense
ttttcaagtctttgtagttg

SEQ ID NO: 1349 - DNA, 20 bp, artificial
  human GFAT antisense
tgtgctgtccacacgagaga

SEQ ID NO: 1350 - DNA, 20 bp, artificial
  human GFAT antisense
cagctcgtccggggtgatct

SEQ ID NO: 1351 - DNA, 20 bp, artificial
  human GFAT antisense
tccacaagcaataagaatca

SEQ ID NO: 1352 - DNA, 20 bp, artificial
  human GFAT antisense
ttacagtaacgaagacccat

SEQ ID NO: 1353 - DNA, 20 bp, artificial
  human GFAT antisense
tcaggaccagcattaatatg

SEQ ID NO: 1354 - DNA, 20 bp, artificial
  human GFAT antisense
accaatctcaggaccagcat

SEQ ID NO: 1355 - DNA, 20 bp, artificial
  human GFAT antisense
aagtagcataatgatagcct

SEQ ID NO: 1356 - DNA, 20 bp, artificial
  human GFAT antisense
ccttatcacaaattaccaca

SEQ ID NO: 1357 - DNA, 20 bp, artificial
  human GFAT antisense
aatcacatattgagtggaat

SEQ ID NO: 1358 - DNA, 20 bp, artificial
  human GFAT antisense
tttagatactccaattaaat

SEQ ID NO: 1359 - DNA, 20 bp, artificial
  human GFAT antisense
taactgtccaagtatgagca

SEQ ID NO: 1360 - DNA, 20 bp, artificial
  human GFAT antisense
cccaccaatgcactactgta

SEQ ID NO: 1361 - DNA, 20 bp, artificial
  human GFAT antisense
ttgtgctataaaattgtgca

SEQ ID NO: 1362 - DNA, 20 bp, artificial
  human GFAT antisense
taggatacccaacatgtaca

SEQ ID NO: 1363 - DNA, 20 bp, artificial
  human GFAT antisense
acagatacaaggaaataaaa

SEQ ID NO: 1364 - DNA, 20 bp, artificial
  human GFAT antisense
taatttaatagcagctctgt

SEQ ID NO: 1365 - DNA, 20 bp, artificial
  human GFAT antisense
gtaagcaaatataccacaca

SEQ ID NO: 1366 - DNA, 20 bp, artificial
  human GFAT antisense
tagggtctccaggatttctc

SEQ ID NO: 1367 - DNA, 20 bp, artificial
  human GFAT antisense
ttgctttccaaaaacttttt

SEQ ID NO: 1368 - DNA, 20 bp, artificial
  human GFAT antisense
tgttggataactctctccac

SEQ ID NO: 1369 - DNA, 20 bp, artificial
  human GFAT antisense
taaacacaagtgcaaaagca

SEQ ID NO: 1370 - DNA, 20 bp, artificial
  human GFAT antisense
ttaaacacaagtgcaaaagc

SEQ ID NO: 1371 - DNA, 20 bp, artificial
  human GFAT antisense
tcctgcagttcgtttaattc

SEQ ID NO: 1372 - DNA, 20 bp, artificial
  human GFAT antisense
ccaatctcaggaccagcatt

SEQ ID NO: 1373 - DNA, 20 bp, artificial
  human GFAT antisense
aaataaggatttactaaaaa

SEQ ID NO: 1374 - DNA, 20 bp, artificial
  human GFAT antisense
gtaacttcacaaaaatcaca

SEQ ID NO: 1375 - DNA, 20 bp, artificial
  human GFAT antisense
aaataatagctagaatcttt

SEQ ID NO: 1376 - DNA, 20 bp, artificial
  human GFAT antisense
ttttcagttttaagttttac

SEQ ID NO: 1377 - DNA, 20 bp, artificial
  human GFAT antisense
ggtggcgccgacacgactcc

SEQ ID NO: 1378 - DNA, 20 bp, artificial
  human GFAT antisense
tataccacacatgatgccgg

SEQ ID NO: 1379 - DNA, 20 bp, artificial
  human GFAT antisense
ttgtcatacatatacttaac

SEQ ID NO: 1380 - DNA, 20 bp, artificial
  human GFAT antisense
ttgttggataactctctcca

SEQ ID NO: 1381 - DNA, 20 bp, artificial
  human GFAT antisense
cttctgcataaatgaactga

SEQ ID NO: 1382 - DNA, 20 bp, artificial
  human GFAT antisense
atcacaggcaactcagtcag

SEQ ID NO: 1383 - DNA, 20 bp, artificial
  human GFAT antisense
tctctccttacagtaacgaa

SEQ ID NO: 1384 - DNA, 20 bp, artificial
  human GFAT antisense
ctccacaatctgtctcccgt

SEQ ID NO: 1385 - DNA, 20 bp, artificial
  human GFAT antisense
agcattaatatgaactccac

SEQ ID NO: 1386 - DNA, 20 bp, artificial
  human GFAT antisense
cagcattaatatgaactcca

SEQ ID NO: 1387 - DNA, 20 bp, artificial
  human GFAT antisense
catggagatccgatcatcac

SEQ ID NO: 1388 - DNA, 20 bp, artificial
  human GFAT antisense
atcaggcagccgtttcaatc

SEQ ID NO: 1389 - DNA, 20 bp, artificial
  human GFAT antisense
gatgccttcagagtgcatat

SEQ ID NO: 1390 - DNA, 20 bp, artificial
  human GFAT antisense
cattctgacacttggcataa

SEQ ID NO: 1391 - DNA, 20 bp, artificial
  human GFAT antisense
acagatttggcaagattccg

SEQ ID NO: 1392 - DNA, 20 bp, artificial
  human GFAT antisense
taaataaggatttactaaaa

SEQ ID NO: 1393 - DNA, 20 bp, artificial
  human GFAT antisense
aattactgggaaaatgtaag

SEQ ID NO: 1394 - DNA, 20 bp, artificial
  human GFAT antisense
gagggtccagaaatgcaaca

SEQ ID NO: 1395 - DNA, 20 bp, artificial
  human GFAT antisense
aaatttcttccacctacaga

SEQ ID NO: 1396 - DNA, 20 bp, artificial
  human GFAT antisense
actttttcaagtctttgtag

SEQ ID NO: 1397 - DNA, 20 bp, artificial
  human GFAT antisense
cttaacgagcttggcaattg

SEQ ID NO: 1398 - DNA, 20 bp, artificial
  human GFAT antisense
taaagctggtatcttgactt

SEQ ID NO: 1399 - DNA, 20 bp, artificial
  human GFAT antisense
ccttgtgccaactgcttgcc

SEQ ID NO: 1400 - DNA, 20 bp, artificial
  human GFAT antisense
acatcatcatcttccagaaa

SEQ ID NO: 1401 - DNA, 20 bp, artificial
  human GFAT antisense
tcaaagtatctgctgtctca

SEQ ID NO: 1402 - DNA, 20 bp, artificial
  human GFAT antisense
tactgggaaaatgtaagagg

SEQ ID NO: 1403 - DNA, 20 bp, artificial
  human GFAT antisense
agtcctccacaaattactgg

SEQ ID NO: 1404 - DNA, 20 bp, artificial
  human GFAT antisense
attccattattcaaagtcct

SEQ ID NO: 1405 - DNA, 20 bp, artificial
  human GFAT antisense
acagtttgatttaaaaacaa

SEQ ID NO: 1406 - DNA, 20 bp, artificial
  human GFAT antisense
tcagttttaagttttacagt

SEQ ID NO: 1407 - DNA, 20 bp, artificial
  human GFAT antisense
aatcctaccaataaaatttt

SEQ ID NO: 1408 - DNA, 20 bp, artificial
  human GFAT antisense
acttagatataaatcctacc

SEQ ID NO: 1409 - DNA, 20 bp, artificial
  human GFAT antisense
taatatttcgcttcctaaat

SEQ ID NO: 1410 - DNA, 20 bp, artificial
  human GFAT antisense
acttttaggagatgaaaaca

SEQ ID NO: 1411 - DNA, 20 bp, artificial
  human GFAT antisense
gatacaaggaaataaaaaac

SEQ ID NO: 1412 - DNA, 20 bp, artificial
  human GFAT antisense
attcagcagtcatttaaaaa

SEQ ID NO: 1413 - DNA, 20 bp, artificial
  human GFAT antisense
cacacatgatgccggagaca

SEQ ID NO: 1414 - DNA, 20 bp, artificial
  human GFAT antisense
cctccatcaaatcccacacc

SEQ ID NO: 1415 - DNA, 20 bp, artificial
  human GFAT antisense
gataaattcattatttttat

SEQ ID NO: 1416 - DNA, 20 bp, artificial
  human GFAT antisense
tgaataacgataaattcatt

SEQ ID NO: 1417 - DNA, 20 bp, artificial
  human GFAT antisense
aattgttggataactctctc

SEQ ID NO: 1418 - DNA, 20 bp, artificial
  human GFAT antisense
aatgtgatcagtagaaagtt

SEQ ID NO: 1419 - DNA, 20 bp, artificial
  human GFAT antisense
cagcttcctttcttgtcttt

SEQ ID NO: 1420 - DNA, 20 bp, artificial
  human GFAT antisense
gattgcagcttcctttcttg

SEQ ID NO: 1421 - DNA, 20 bp, artificial
  human GFAT antisense
tactccactgctttttcttc

SEQ ID NO: 1422 - DNA, 20 bp, artificial
  human GFAT antisense
ccatctggagtgtttgcaca

SEQ ID NO: 1423 - DNA, 20 bp, artificial
  human GFAT antisense
ctgctcaaatatttccttct

SEQ ID NO: 1424 - DNA, 20 bp, artificial
  human GFAT antisense
ctagtttctgaatttcgtca

SEQ ID NO: 1425 - DNA, 20 bp, artificial
  human GFAT antisense
tctgatgataaagttctgtt

SEQ ID NO: 1426 - DNA, 20 bp, artificial
  human GFAT antisense
cattatcagaactgacttct

SEQ ID NO: 1427 - DNA, 20 bp, artificial
  human GFAT antisense
ttcaccagcaaggatgcctt

SEQ ID NO: 1428 - DNA, 20 bp, artificial
  human GFAT antisense
gatttggcaagattccgtgg

SEQ ID NO: 1429 - DNA, 20 bp, artificial
  human GFAT antisense
aactgatatataaataagga

SEQ ID NO: 1430 - DNA, 20 bp, artificial
  human GFAT antisense
gattccattattcaaagtcc

SEQ ID NO: 1431 - DNA, 20 bp, artificial
  human GFAT antisense
agggtccagaaatgcaacac

SEQ ID NO: 1432 - DNA, 20 bp, artificial
  human GFAT antisense
tatgttaaggattgagaccc

SEQ ID NO: 1433 - DNA, 20 bp, artificial
  human GFAT antisense
tcattcagcagtcatttaaa

SEQ ID NO: 1434 - DNA, 20 bp, artificial
  human GFAT antisense
cgagcttcggtgggcaatct

SEQ ID NO: 1435 - DNA, 20 bp, artificial
  human GFAT antisense
tgtactccagtctctgaagg

SEQ ID NO: 1436 - DNA, 20 bp, artificial
  human GFAT antisense
ccaaggtagtaaagctggta

SEQ ID NO: 1437 - DNA, 20 bp, artificial
  human GFAT antisense
ttgtgccaactgcttgcccg

SEQ ID NO: 1438 - DNA, 20 bp, artificial
  human GFAT antisense
actccactgctttttcttcc

SEQ ID NO: 1439 - DNA, 20 bp, artificial
  human GFAT antisense
gctcaaatatttccttctgc

SEQ ID NO: 1440 - DNA, 20 bp, artificial
  human GFAT antisense
aaaccacccaaattcacagt

SEQ ID NO: 1441 - DNA, 20 bp, artificial
  human GFAT antisense
acttgacgtgttgctacacc

SEQ ID NO: 1442 - DNA, 20 bp, artificial
  human GFAT antisense
cagtcagctcctcaagaact

SEQ ID NO: 1443 - DNA, 20 bp, artificial
  human GFAT antisense
caggaccagcattaatatga

SEQ ID NO: 1444 - DNA, 20 bp, artificial
  human GFAT antisense
aatccaagcatgatctcttt

SEQ ID NO: 1445 - DNA, 20 bp, artificial
  human GFAT antisense
gacttctgatgataaagttc

SEQ ID NO: 1446 - DNA, 20 bp, artificial
  human GFAT antisense
tagcataatgatagcctcgt

SEQ ID NO: 1447 - DNA, 20 bp, artificial
  human GFAT antisense
cagcaaggatgccttcagag

SEQ ID NO: 1448 - DNA, 20 bp, artificial
  human GFAT antisense
cataagtgtgatctctcatg

SEQ ID NO: 1449 - DNA, 20 bp, artificial
  human GFAT antisense
accttgatcgttctttttgt

SEQ ID NO: 1450 - DNA, 20 bp, artificial
  human GFAT antisense
cagcaaggtggaaagccagc

SEQ ID NO: 1451 - DNA, 20 bp, artificial
  human GFAT antisense
ttggcaagattccgtgggaa

SEQ ID NO: 1452 - DNA, 20 bp, artificial
  human GFAT antisense
cagatttggcaagattccgt

SEQ ID NO: 1453 - DNA, 20 bp, artificial
  human GFAT antisense
aatcaaggttttaaatacaa

SEQ ID NO: 1454 - DNA, 20 bp, artificial
  human GFAT antisense
attactgggaaaatgtaaga

SEQ ID NO: 1455 - DNA, 20 bp, artificial
  human GFAT antisense
taaatgcactactctttcac

SEQ ID NO: 1456 - DNA, 20 bp, artificial
  human GFAT antisense
aaaatcatattgtcagttgt

SEQ ID NO: 1457 - DNA, 20 bp, artificial
  human GFAT antisense
aaaaacacttttaggagatg

SEQ ID NO: 1458 - DNA, 20 bp, artificial
  human GFAT antisense
ttaatttaatagcagctctg

SEQ ID NO: 1459 - DNA, 20 bp, artificial
  human GFAT antisense
tgatgccggagacacggccc

SEQ ID NO: 1460 - DNA, 20 bp, artificial
  human GFAT antisense
ttatttttatcagagcgctg

SEQ ID NO: 1461 - DNA, 20 bp, artificial
  human GFAT antisense
tagtaaagctggtatcttga

SEQ ID NO: 1462 - DNA, 20 bp, artificial
  human GFAT antisense
cactactgctgcaacatcat

SEQ ID NO: 1463 - DNA, 20 bp, artificial
  human GFAT antisense
atcaaagtatctgctgtctc

SEQ ID NO: 1464 - DNA, 20 bp, artificial
  human GFAT antisense
gcatggagatccgatcatca

SEQ ID NO: 1465 - DNA, 20 bp, artificial
  human GFAT antisense
ctgttgctagtttctgaatt

SEQ ID NO: 1466 - DNA, 20 bp, artificial
  human GFAT antisense
gataaagttctgttgctagt

SEQ ID NO: 1467 - DNA, 20 bp, artificial
  human GFAT antisense
ccacaggccgcccctgccga

SEQ ID NO: 1468 - DNA, 20 bp, artificial
  human GFAT antisense
gtcacagatttggcaagatt

SEQ ID NO: 1469 - DNA, 20 bp, artificial
  human GFAT antisense
ataaataaggatttactaaa

SEQ ID NO: 1470 - DNA, 20 bp, artificial
  human GFAT antisense
atcacatattgagtggaata

SEQ ID NO: 1471 - DNA, 20 bp, artificial
  human GFAT antisense
cagattgaagtggagggtcc

SEQ ID NO: 1472 - DNA, 20 bp, artificial
  human GFAT antisense
atttaaagtttgtgctataa

SEQ ID NO: 1473 - DNA, 20 bp, artificial
  human GFAT antisense
gtcattcagcagtcatttaa

SEQ ID NO: 1474 - DNA, 20 bp, artificial
  human GFAT antisense
ggcgagtggctggcgggatc

SEQ ID NO: 1475 - DNA, 20 bp, artificial
  human GFAT antisense
cgaggaacatggtagtttaa

SEQ ID NO: 1476 - DNA, 20 bp, artificial
  human GFAT antisense
ctcgttcgaggaacatggta

SEQ ID NO: 1477 - DNA, 20 bp, artificial
  human GFAT antisense
cttcccaatctttatcattg

SEQ ID NO: 1478 - DNA, 20 bp, artificial
  human GFAT antisense
cgccttgtgccaactgcttg

SEQ ID NO: 1479 - DNA, 20 bp, artificial
  human GFAT antisense
ttgtgctgtccacacgagag

SEQ ID NO: 1480 - DNA, 20 bp, artificial
  human GFAT antisense
tcctttatgtgatccttcaa

SEQ ID NO: 1481 - DNA, 20 bp, artificial
  human GFAT antisense
cgccggcatctctggatctc

SEQ ID NO: 1482 - DNA, 20 bp, artificial
  human GFAT antisense
aatttatccaccaaagccag

SEQ ID NO: 1483 - DNA, 20 bp, artificial
  human GFAT antisense
agattccattattcaaagtc

SEQ ID NO: 1484 - DNA, 20 bp, artificial
  human GFAT antisense
aatgaagtatggtgaaacaa

SEQ ID NO: 1485 - DNA, 20 bp, artificial
  human GFAT antisense
attaaatgcactactctttc

SEQ ID NO: 1486 - DNA, 20 bp, artificial
  human GFAT antisense
tatttcgcttcctaaatttc

SEQ ID NO: 1487 - DNA, 20 bp, artificial
  human GFAT antisense
atgttaaggattgagaccca

SEQ ID NO: 1488 - DNA, 20 bp, artificial
  human GFAT antisense
ggatacccaacatgtacaca

SEQ ID NO: 1489 - DNA, 20 bp, artificial
  human GFAT antisense
tacagatacaaggaaataaa

SEQ ID NO: 1490 - DNA, 20 bp, artificial
  human GFAT antisense
ctgtactccagtctctgaag

SEQ ID NO: 1491 - DNA, 20 bp, artificial
  human GFAT antisense
taacgagcttggcaattgtc

SEQ ID NO: 1492 - DNA, 20 bp, artificial
  human GFAT antisense
agtaaagctggtatcttgac

SEQ ID NO: 1493 - DNA, 20 bp, artificial
  human GFAT antisense
gtttctgtccaggaagtcac

SEQ ID NO: 1494 - DNA, 20 bp, artificial
  human GFAT antisense
ctggtgtgtttctgtccagg

SEQ ID NO: 1495 - DNA, 20 bp, artificial
  human GFAT antisense
ttgtgatccccacagttaaa

SEQ ID NO: 1496 - DNA, 20 bp, artificial
  human GFAT antisense
ctgccaactgtgtttgtgat

SEQ ID NO: 1497 - DNA, 20 bp, artificial
  human GFAT antisense
cttgcatggagatccgatca

SEQ ID NO: 1498 - DNA, 20 bp, artificial
  human GFAT antisense
tttctgaatttcgtcatcca

SEQ ID NO: 1499 - DNA, 20 bp, artificial
  human GFAT antisense
caagacaagtagcataatga

SEQ ID NO: 1500 - DNA, 20 bp, artificial
  human GFAT antisense
agtgcatataagtaatttct

SEQ ID NO: 1501 - DNA, 20 bp, artificial
  human GFAT antisense
attgtgcaaatatgttaagg

SEQ ID NO: 1502 - DNA, 20 bp, artificial
  human GFAT antisense
atgtacacatcccatcttca

SEQ ID NO: 1503 - DNA, 20 bp, artificial
  human GFAT antisense
catgtacacatcccatcttc

SEQ ID NO: 1504 - DNA, 20 bp, artificial
  human GFAT antisense
acccaacatgtacacatccc

SEQ ID NO: 1505 - DNA, 20 bp, artificial
  human GFAT antisense
aggagatgaaaacacaaagt

SEQ ID NO: 1506 - DNA, 20 bp, artificial
  human GFAT antisense
cacacgagcttcggtgggca

SEQ ID NO: 1507 - DNA, 20 bp, artificial
  human GFAT antisense
gcttcccaatctttatcatt

SEQ ID NO: 1508 - DNA, 20 bp, artificial
  human GFAT antisense
attgtgaataacgataaatt

SEQ ID NO: 1509 - DNA, 20 bp, artificial
  human GFAT antisense
ggcaattgtctctgtgtctg

SEQ ID NO: 1510 - DNA, 20 bp, artificial
  human GFAT antisense
aagctggtatcttgactttc

SEQ ID NO: 1511 - DNA, 20 bp, artificial
  human GFAT antisense
agcaaagtaatactccactg

SEQ ID NO: 1512 - DNA, 20 bp, artificial
  human GFAT antisense
tgtttgcacagctcgtccgg

SEQ ID NO: 1513 - DNA, 20 bp, artificial
  human GFAT antisense
caggcaactcagtcagctcc

SEQ ID NO: 1514 - DNA, 20 bp, artificial
  human GFAT antisense
cctctctccttacagtaacg

SEQ ID NO: 1515 - DNA, 20 bp, artificial
  human GFAT antisense
gatgataaagttctgttgct

SEQ ID NO: 1516 - DNA, 20 bp, artificial
  human GFAT antisense
agcataatgatagcctcgtc

SEQ ID NO: 1517 - DNA, 20 bp, artificial
  human GFAT antisense
ctctcatgatgatcatgatc

SEQ ID NO: 1518 - DNA, 20 bp, artificial
  human GFAT antisense
gccgcccctgccgagcaacc

SEQ ID NO: 1519 - DNA, 20 bp, artificial
  human GFAT antisense
cttaatcatacagtttcgta

SEQ ID NO: 1520 - DNA, 20 bp, artificial
  human GFAT antisense
ctgaatgaagtatggtgaaa

SEQ ID NO: 1521 - DNA, 20 bp, artificial
  human GFAT antisense
ctccaattaaatgcactact

SEQ ID NO: 1522 - DNA, 20 bp, artificial
  human GFAT antisense
ctttagatactccaattaaa

SEQ ID NO: 1523 - DNA, 20 bp, artificial
  human GFAT antisense
aacccttccctaactgtcca

SEQ ID NO: 1524 - DNA, 20 bp, artificial
  human GFAT antisense
acccaccaatgcactactgt

SEQ ID NO: 1525 - DNA, 20 bp, artificial
  human GFAT antisense
tgtgctataaaattgtgcaa

SEQ ID NO: 1526 - DNA, 20 bp, artificial
  human GFAT antisense
atttaaaatcatattgtcag

SEQ ID NO: 1527 - DNA, 20 bp, artificial
  human GFAT antisense
aggatacccaacatgtacac

SEQ ID NO: 1528 - DNA, 20 bp, artificial
  human GFAT antisense
gtggctggcgggatcggggg

SEQ ID NO: 1529 - DNA, 20 bp, artificial
  human GFAT antisense
cagcagaatcatatcctctg

SEQ ID NO: 1530 - DNA, 20 bp, artificial
  human GFAT antisense
tttcctttcttcttaataag

SEQ ID NO: 1531 - DNA, 20 bp, artificial
  human GFAT antisense
tttgctttccaaaaactttt

SEQ ID NO: 1532 - DNA, 20 bp, artificial
  human GFAT antisense
cccgattgtcatacatatac

SEQ ID NO: 1533 - DNA, 20 bp, artificial
  human GFAT antisense
aaacacaagtgcaaaagcac

SEQ ID NO: 1534 - DNA, 20 bp, artificial
  human GFAT antisense
ttctgcataaatgaactgaa

SEQ ID NO: 1535 - DNA, 20 bp, artificial
  human GFAT antisense
cttcaaaccacccaaattca

SEQ ID NO: 1536 - DNA, 20 bp, artificial
  human GFAT antisense
tcagtcagctcctcaagaac

SEQ ID NO: 1537 - DNA, 20 bp, artificial
  human GFAT antisense
taacgaagacccatcaaagt

SEQ ID NO: 1538 - DNA, 20 bp, artificial
  human GFAT antisense
gtaacgaagacccatcaaag

SEQ ID NO: 1539 - DNA, 20 bp, artificial
  human GFAT antisense
tgaactccacaatctgtctc

SEQ ID NO: 1540 - DNA, 20 bp, artificial
  human GFAT antisense
tttcaatccaagcatgatct

SEQ ID NO: 1541 - DNA, 20 bp, artificial
  human GFAT antisense
cccattatcagaactgactt

SEQ ID NO: 1542 - DNA, 20 bp, artificial
  human GFAT antisense
atgccttcagagtgcatata

SEQ ID NO: 1543 - DNA, 20 bp, artificial
  human GFAT antisense
aaattaccacaggccgcccc

SEQ ID NO: 1544 - DNA, 20 bp, artificial
  human GFAT antisense
ttccattattcaaagtcctc

SEQ ID NO: 1545 - DNA, 20 bp, artificial
  human GFAT antisense
ctaactgtccaagtatgagc

SEQ ID NO: 1546 - DNA, 20 bp, artificial
  human GFAT antisense
caaacccttccctaactgtc

SEQ ID NO: 1547 - DNA, 20 bp, artificial
  human GFAT antisense
tcttaaaacttggcaaaccc

SEQ ID NO: 1548 - DNA, 20 bp, artificial
  human GFAT antisense
ttcagcagtcatttaaaaaa

SEQ ID NO: 1549 - DNA, 20 bp, artificial
  human GFAT antisense
atattaatttaatagcagct

SEQ ID NO: 1550 - DNA, 20 bp, artificial
  human GFAT antisense
aatattaatttaatagcagc

SEQ ID NO: 1551 - DNA, 20 bp, artificial
  human GFAT antisense
acatgatgccggagacacgg

SEQ ID NO: 1552 - DNA, 20 bp, artificial
  human GFAT antisense
aggaacatggtagtttaagt

SEQ ID NO: 1553 - DNA, 20 bp, artificial
  human GFAT antisense
caatctttatcattgcctcc

SEQ ID NO: 1554 - DNA, 20 bp, artificial
  human GFAT antisense
aataacgataaattcattat

SEQ ID NO: 1555 - DNA, 20 bp, artificial
  human GFAT antisense
tcttgtctttgcctgttctg

SEQ ID NO: 1556 - DNA, 20 bp, artificial
  human GFAT antisense
actactgctgcaacatcatc

SEQ ID NO: 1557 - DNA, 20 bp, artificial
  human GFAT antisense
cacagctcgtccggggtgat

SEQ ID NO: 1558 - DNA, 20 bp, artificial
  human GFAT antisense
gcacagctcgtccggggtga

SEQ ID NO: 1559 - DNA, 20 bp, artificial
  human GFAT antisense
cagtatagtcatcaaagttg

SEQ ID NO: 1560 - DNA, 20 bp, artificial
  human GFAT antisense
ccatcaaagtatctgctgtc

SEQ ID NO: 1561 - DNA, 20 bp, artificial
  human GFAT antisense
atcagaactgacttctgatg

SEQ ID NO: 1562 - DNA, 20 bp, artificial
  human GFAT antisense
tgccttcagagtgcatataa

SEQ ID NO: 1563 - DNA, 20 bp, artificial
  human GFAT antisense
atgtttcaattcaccagcaa

SEQ ID NO: 1564 - DNA, 20 bp, artificial
  human GFAT antisense
ttcgtacattttgtatagat

SEQ ID NO: 1565 - DNA, 20 bp, artificial
  human GFAT antisense
cactactgtaatatttcgct

SEQ ID NO: 1566 - DNA, 20 bp, artificial
  human GFAT antisense
tcagcagtcatttaaaaaat

SEQ ID NO: 1567 - DNA, 20 bp, artificial
  human GFAT antisense
ggggtgcacacacgagcttc

SEQ ID NO: 1568 - DNA, 20 bp, artificial
  human GFAT antisense
ccagtctctgaaggcctttg

SEQ ID NO: 1569 - DNA, 20 bp, artificial
  human GFAT antisense
tcccaatctttatcattgcc

SEQ ID NO: 1570 - DNA, 20 bp, artificial
  human GFAT antisense
ttaacgagcttggcaattgt

SEQ ID NO: 1571 - DNA, 20 bp, artificial
  human GFAT antisense
tggagtgtttgcacagctcg

SEQ ID NO: 1572 - DNA, 20 bp, artificial
  human GFAT antisense
aaattcacagtatagtcatc

SEQ ID NO: 1573 - DNA, 20 bp, artificial
  human GFAT antisense
ctttcttgcatggagatccg

SEQ ID NO: 1574 - DNA, 20 bp, artificial
  human GFAT antisense
agaactgacttctgatgata

SEQ ID NO: 1575 - DNA, 20 bp, artificial
  human GFAT antisense
catgtttcaattcaccagca

SEQ ID NO: 1576 - DNA, 20 bp, artificial
  human GFAT antisense
tctgacacttggcataagtg

SEQ ID NO: 1577 - DNA, 20 bp, artificial
  human GFAT antisense
gccgagcaaccacttgctga

SEQ ID NO: 1578 - DNA, 20 bp, artificial
  human GFAT antisense
tgccgagcaaccacttgctg

SEQ ID NO: 1579 - DNA, 20 bp, artificial
  human GFAT antisense
ggggcaccttgatcgttctt

SEQ ID NO: 1580 - DNA, 20 bp, artificial
  human GFAT antisense
tctcagcacagcaaggtgga

SEQ ID NO: 1581 - DNA, 20 bp, artificial
  human GFAT antisense
tccgtgggaaatcaacatca

SEQ ID NO: 1582 - DNA, 20 bp, artificial
  human GFAT antisense
ttccgtgggaaatcaacatc

SEQ ID NO: 1583 - DNA, 20 bp, artificial
  human GFAT antisense
agatttggcaagattccgtg

SEQ ID NO: 1584 - DNA, 20 bp, artificial
  human GFAT antisense
cttcacaaaaatcacatatt

SEQ ID NO: 1585 - DNA, 20 bp, artificial
  human GFAT antisense
aaatcctaccaataaaattt

SEQ ID NO: 1586 - DNA, 20 bp, artificial
  human GFAT antisense
ggaaataaaaaacactttta

SEQ ID NO: 1587 - DNA, 20 bp, artificial
  human GFAT antisense
acacacgagcttcggtgggc

SEQ ID NO: 1588 - DNA, 20 bp, artificial
  human GFAT antisense
aggccaggggcgagtggctg

SEQ ID NO: 1589 - DNA, 20 bp, artificial
  human GFAT antisense
gctattgacaggactgggtt

SEQ ID NO: 1590 - DNA, 20 bp, artificial
  human GFAT antisense
tcatacatatacttaacgag

SEQ ID NO: 1591 - DNA, 20 bp, artificial
  human GFAT antisense
aaagctggtatcttgacttt

SEQ ID NO: 1592 - DNA, 20 bp, artificial
  human GFAT antisense
caccttccaattgttggata

SEQ ID NO: 1593 - DNA, 20 bp, artificial
  human GFAT antisense
atcagaagcaaagtaatact

SEQ ID NO: 1594 - DNA, 20 bp, artificial
  human GFAT antisense
ccactactgctgcaacatca

SEQ ID NO: 1595 - DNA, 20 bp, artificial
  human GFAT antisense
cacccaaattcacagtatag

SEQ ID NO: 1596 - DNA, 20 bp, artificial
  human GFAT antisense
tctcaggaccagcattaata

SEQ ID NO: 1597 - DNA, 20 bp, artificial
  human GFAT antisense
ttcaatccaagcatgatctc

SEQ ID NO: 1598 - DNA, 20 bp, artificial
  human GFAT antisense
acttctgatgataaagttct

SEQ ID NO: 1599 - DNA, 20 bp, artificial
  human GFAT antisense
tgacacttggcataagtgtg

SEQ ID NO: 1600 - DNA, 20 bp, artificial
  human GFAT antisense
tggggcaccttgatcgttct

SEQ ID NO: 1601 - DNA, 20 bp, artificial
  human GFAT antisense
tcatagcctctcagcacagc

SEQ ID NO: 1602 - DNA, 20 bp, artificial
  human GFAT antisense
tcgtacattttgtatagata

SEQ ID NO: 1603 - DNA, 20 bp, artificial
  human GFAT antisense
aaacccttccctaactgtcc

SEQ ID NO: 1604 - DNA, 20 bp, artificial
  human GFAT antisense
tttttcagttttaagtttta

SEQ ID NO: 1605 - DNA, 20 bp, artificial
  human GFAT antisense
ttagatataaatcctaccaa

SEQ ID NO: 1606 - DNA, 20 bp, artificial
  human GFAT antisense
cccaacatgtacacatccca

SEQ ID NO: 1607 - DNA, 20 bp, artificial
  human GFAT antisense
ctacagatacaaggaaataa

SEQ ID NO: 1608 - DNA, 20 bp, artificial
  human GFAT antisense
ccatatcttgttgcttgtga

SEQ ID NO: 1609 - DNA, 20 bp, artificial
  human GFAT antisense
ctttcccgattgtcatacat

SEQ ID NO: 1610 - DNA, 20 bp, artificial
  human GFAT antisense
atggatagaaagacgtccat

SEQ ID NO: 1611 - DNA, 20 bp, artificial
  human GFAT antisense
acagctcgtccggggtgatc

SEQ ID NO: 1612 - DNA, 20 bp, artificial
  human GFAT antisense
tgttcacgacagactctggc

SEQ ID NO: 1613 - DNA, 20 bp, artificial
  human GFAT antisense
aatatgaactccacaatctg

SEQ ID NO: 1614 - DNA, 20 bp, artificial
  human GFAT antisense
gccttcagagtgcatataag

SEQ ID NO: 1615 - DNA, 20 bp, artificial
  human GFAT antisense
accagcaaggatgccttcag

SEQ ID NO: 1616 - DNA, 20 bp, artificial
  human GFAT antisense
tcacaaattaccacaggccg

SEQ ID NO: 1617 - DNA, 20 bp, artificial
  human GFAT antisense
caaggttttaaatacaaaag

SEQ ID NO: 1618 - DNA, 20 bp, artificial
  human GFAT antisense
cttaaaacttggcaaaccct

SEQ ID NO: 1619 - DNA, 20 bp, artificial
  human GFAT antisense
tcgcttcctaaatttcttcc

SEQ ID NO: 1620 - DNA, 20 bp, artificial
  human GFAT antisense
aaaaaacacttttaggagat

SEQ ID NO: 1621 - DNA, 20 bp, artificial
  human GFAT antisense
tgtcattcagcagtcattta

SEQ ID NO: 1622 - DNA, 20 bp, artificial
  human GFAT antisense
aatagcagctctgtgttgtg

SEQ ID NO: 1623 - DNA, 20 bp, artificial
  human GFAT antisense
ctctgtactccagtctctga

SEQ ID NO: 1624 - DNA, 20 bp, artificial
  human GFAT antisense
atccatatcttgttgcttgt

SEQ ID NO: 1625 - DNA, 20 bp, artificial
  human GFAT antisense
aactttttcaagtctttgta

SEQ ID NO: 1626 - DNA, 20 bp, artificial
  human GFAT antisense
cttttaaacacaagtgcaaa

SEQ ID NO: 1627 - DNA, 20 bp, artificial
  human GFAT antisense
cacgagagagattgcagctt

SEQ ID NO: 1628 - DNA, 20 bp, artificial
  human GFAT antisense
cgggaaaaggcaggttgtgc

SEQ ID NO: 1629 - DNA, 20 bp, artificial
  human GFAT antisense
catcttccagaaagatgacg

SEQ ID NO: 1630 - DNA, 20 bp, artificial
  human GFAT antisense
cctgcagttcgtttaattcg

SEQ ID NO: 1631 - DNA, 20 bp, artificial
  human GFAT antisense
atgatctctttgcgtctttc

SEQ ID NO: 1632 - DNA, 20 bp, artificial
  human GFAT antisense
aagttctgttgctagtttct

SEQ ID NO: 1633 - DNA, 20 bp, artificial
  human GFAT antisense
agagcattctgacacttggc

SEQ ID NO: 1634 - DNA, 20 bp, artificial
  human GFAT antisense
ttatcacaaattaccacagg

SEQ ID NO: 1635 - DNA, 20 bp, artificial
  human GFAT antisense
taaagggatcacgctgagaa

SEQ ID NO: 1636 - DNA, 20 bp, artificial
  human GFAT antisense
tataaataaggatttactaa

SEQ ID NO: 1637 - DNA, 20 bp, artificial
  human GFAT antisense
ttttagaaacatattgtctt

SEQ ID NO: 1638 - DNA, 20 bp, artificial
  human GFAT antisense
tttttagaaacatattgtct

SEQ ID NO: 1639 - DNA, 20 bp, artificial
  human GFAT antisense
aatcacatcttctcttaaaa

SEQ ID NO: 1640 - DNA, 20 bp, artificial
  human GFAT antisense
ctgtaatatttcgcttccta

SEQ ID NO: 1641 - DNA, 20 bp, artificial
  human GFAT antisense
cagctctgtgttgtgatttt

SEQ ID NO: 1642 - DNA, 20 bp, artificial
  human GFAT antisense
gagcttcggtgggcaatctg

SEQ ID NO: 1643 - DNA, 20 bp, artificial
  human GFAT antisense
ctttccaaaaactttttcaa

SEQ ID NO: 1644 - DNA, 20 bp, artificial
  human GFAT antisense
ttcagattcgaagtcatagc

SEQ ID NO: 1645 - DNA, 20 bp, artificial
  human GFAT antisense
ggataactctctccaccaag

SEQ ID NO: 1646 - DNA, 20 bp, artificial
  human GFAT antisense
acttttaaacacaagtgcaa

SEQ ID NO: 1647 - DNA, 20 bp, artificial
  human GFAT antisense
ggtgtgttctatgacagcac

SEQ ID NO: 1648 - DNA, 20 bp, artificial
  human GFAT antisense
gatgacgcgattggtgtgtt

SEQ ID NO: 1649 - DNA, 20 bp, artificial
  human GFAT antisense
cagaaagatgacgcgattgg

SEQ ID NO: 1650 - DNA, 20 bp, artificial
  human GFAT antisense
catcacaggcaactcagtca

SEQ ID NO: 1651 - DNA, 20 bp, artificial
  human GFAT antisense
cgaagacccatcaaagtatc

SEQ ID NO: 1652 - DNA, 20 bp, artificial
  human GFAT antisense
atctcaggaccagcattaat

SEQ ID NO: 1653 - DNA, 20 bp, artificial
  human GFAT antisense
gctggtataagcctttgtac

SEQ ID NO: 1654 - DNA, 20 bp, artificial
  human GFAT antisense
ataatgatagcctcgtccca

SEQ ID NO: 1655 - DNA, 20 bp, artificial
  human GFAT antisense
tgatctctcatgatgatcat

SEQ ID NO: 1656 - DNA, 20 bp, artificial
  human GFAT antisense
gcaccttgatcgttcttttt

SEQ ID NO: 1657 - DNA, 20 bp, artificial
  human GFAT antisense
tagattccattattcaaagt

SEQ ID NO: 1658 - DNA, 20 bp, artificial
  human GFAT antisense
atagctagaatctttctgat

SEQ ID NO: 1659 - DNA, 20 bp, artificial
  human GFAT antisense
tttagaaacatattgtcttc

SEQ ID NO: 1660 - DNA, 20 bp, artificial
  human GFAT antisense
tgaatgaagtatggtgaaac

SEQ ID NO: 1661 - DNA, 20 bp, artificial
  human GFAT antisense
cctacagataatagacaaca

SEQ ID NO: 1662 - DNA, 20 bp, artificial
  human GFAT antisense
gtgctataaaattgtgcaaa

SEQ ID NO: 1663 - DNA, 20 bp, artificial
  human GFAT antisense
aatttaaaatcatattgtca

SEQ ID NO: 1664 - DNA, 20 bp, artificial
  human GFAT antisense
gggatcgggggtgcacacac

SEQ ID NO: 1665 - DNA, 20 bp, artificial
  human GFAT antisense
tggtagtttaagtaagcaaa

SEQ ID NO: 1666 - DNA, 20 bp, artificial
  human GFAT antisense
atggtagtttaagtaagcaa

SEQ ID NO: 1667 - DNA, 20 bp, artificial
  human GFAT antisense
ttcccaatctttatcattgc

SEQ ID NO: 1668 - DNA, 20 bp, artificial
  human GFAT antisense
acttaacgagcttggcaatt

SEQ ID NO: 1669 - DNA, 20 bp, artificial
  human GFAT antisense
ttttaaacacaagtgcaaaa

SEQ ID NO: 1670 - DNA, 20 bp, artificial
  human GFAT antisense
ccaatcaacagagggctacc

SEQ ID NO: 1671 - DNA, 20 bp, artificial
  human GFAT antisense
gcatcagaagcaaagtaata

SEQ ID NO: 1672 - DNA, 20 bp, artificial
  human GFAT antisense
caaattcacagtatagtcat

SEQ ID NO: 1673 - DNA, 20 bp, artificial
  human GFAT antisense
cttgacgtgttgctacacca

SEQ ID NO: 1674 - DNA, 20 bp, artificial
  human GFAT antisense
ccccacagttaaagctcctc

SEQ ID NO: 1675 - DNA, 20 bp, artificial
  human GFAT antisense
tccccacagttaaagctcct

SEQ ID NO: 1676 - DNA, 20 bp, artificial
  human GFAT antisense
gcattctgacacttggcata

SEQ ID NO: 1677 - DNA, 20 bp, artificial
  human GFAT antisense
gagtggggcaccttgatcgt

SEQ ID NO: 1678 - DNA, 20 bp, artificial
  human GFAT antisense
tgggaaaatgtaagaggtaa

SEQ ID NO: 1679 - DNA, 20 bp, artificial
  human GFAT antisense
agattgaagtggagggtcca

SEQ ID NO: 1680 - DNA, 20 bp, artificial
  human GFAT antisense
taaaaaacacttttaggaga

SEQ ID NO: 1681 - DNA, 20 bp, artificial
  human GFAT antisense
actccagtctctgaaggcct

SEQ ID NO: 1682 - DNA, 20 bp, artificial
  human GFAT antisense
cgagcttggcaattgtctct

SEQ ID NO: 1683 - DNA, 20 bp, artificial
  human GFAT antisense
tttcccgattgtcatacata

SEQ ID NO: 1684 - DNA, 20 bp, artificial
  human GFAT antisense
accttccaattgttggataa

SEQ ID NO: 1685 - DNA, 20 bp, artificial
  human GFAT antisense
tttaaacacaagtgcaaaag

SEQ ID NO: 1686 - DNA, 20 bp, artificial
  human GFAT antisense
gaatgtgatcagtagaaagt

SEQ ID NO: 1687 - DNA, 20 bp, artificial
  human GFAT antisense
tgcatcagaagcaaagtaat

SEQ ID NO: 1688 - DNA, 20 bp, artificial
  human GFAT antisense
aacatcatcatcttccagaa

SEQ ID NO: 1689 - DNA, 20 bp, artificial
  human GFAT antisense
aagactggtgtgtttctgtc

SEQ ID NO: 1690 - DNA, 20 bp, artificial
  human GFAT antisense
tgataaagttctgttgctag

SEQ ID NO: 1691 - DNA, 20 bp, artificial
  human GFAT antisense
atgataaagttctgttgcta

SEQ ID NO: 1692 - DNA, 20 bp, artificial
  human GFAT antisense
tcccattatcagaactgact

SEQ ID NO: 1693 - DNA, 20 bp, artificial
  human GFAT antisense
acaggcatcaatttatccac

SEQ ID NO: 1694 - DNA, 20 bp, artificial
  human GFAT antisense
cacaggcatcaatttatcca

SEQ ID NO: 1695 - DNA, 20 bp, artificial
  human GFAT antisense
catcatagcctctcagcaca

SEQ ID NO: 1696 - DNA, 20 bp, artificial
  human GFAT antisense
aagtatggtgaaacaagtac

SEQ ID NO: 1697 - DNA, 20 bp, artificial
  human GFAT antisense
gctttagatactccaattaa

SEQ ID NO: 1698 - DNA, 20 bp, artificial
  human GFAT antisense
ataaatcacatcttctctta

SEQ ID NO: 1699 - DNA, 20 bp, artificial
  human GFAT antisense
tgtaatatttcgcttcctaa

SEQ ID NO: 1700 - DNA, 20 bp, artificial
  human GFAT antisense
actactgtaatatttcgctt

SEQ ID NO: 1701 - DNA, 20 bp, artificial
  human GFAT antisense
aaactttttcaagtctttgt

SEQ ID NO: 1702 - DNA, 20 bp, artificial
  human GFAT antisense
gccaactgcttgcccgggaa

SEQ ID NO: 1703 - DNA, 20 bp, artificial
  human GFAT antisense
tcaacagagggctacctcgc

SEQ ID NO: 1704 - DNA, 20 bp, artificial
  human GFAT antisense
gtgtgttctatgacagcact

SEQ ID NO: 1705 - DNA, 20 bp, artificial
  human GFAT antisense
attggtgtgttctatgacag

SEQ ID NO: 1706 - DNA, 20 bp, artificial
  human GFAT antisense
cataaatgaactgaagttgc

SEQ ID NO: 1707 - DNA, 20 bp, artificial
  human GFAT antisense
agcaataagaatcaaacgcc

SEQ ID NO: 1708 - DNA, 20 bp, artificial
  human GFAT antisense
caactcagtcagctcctcaa

SEQ ID NO: 1709 - DNA, 20 bp, artificial
  human GFAT antisense
ccagcattaatatgaactcc

SEQ ID NO: 1710 - DNA, 20 bp, artificial
  human GFAT antisense
gaccagcattaatatgaact

SEQ ID NO: 1711 - DNA, 20 bp, artificial
  human GFAT antisense
aggaccagcattaatatgaa

SEQ ID NO: 1712 - DNA, 20 bp, artificial
  human GFAT antisense
taatgatagcctcgtcccat

SEQ ID NO: 1713 - DNA, 20 bp, artificial
  human GFAT antisense
cataatgatagcctcgtccc

SEQ ID NO: 1714 - DNA, 20 bp, artificial
  human GFAT antisense
cacagcaaggtggaaagcca

SEQ ID NO: 1715 - DNA, 20 bp, artificial
  human GFAT antisense
catagcctctcagcacagca

SEQ ID NO: 1716 - DNA, 20 bp, artificial
  human GFAT antisense
atcaaggttttaaatacaaa

SEQ ID NO: 1717 - DNA, 20 bp, artificial
  human GFAT antisense
gagtggaataattataactg

SEQ ID NO: 1718 - DNA, 20 bp, artificial
  human GFAT antisense
ggtgaaacaagtaccaattt

SEQ ID NO: 1719 - DNA, 20 bp, artificial
  human GFAT antisense
cttccacctacagataatag

SEQ ID NO: 1720 - DNA, 20 bp, artificial
  human GFAT antisense
aattgtgcaaatatgttaag

SEQ ID NO: 1721 - DNA, 20 bp, artificial
  human GFAT antisense
gtttgtgctataaaattgtg

SEQ ID NO: 1722 - DNA, 20 bp, artificial
  human GFAT antisense
acatgtacacatcccatctt

SEQ ID NO: 1723 - DNA, 20 bp, artificial
  human GFAT antisense
taagcaaatataccacacat

SEQ ID NO: 1724 - DNA, 20 bp, artificial
  human GFAT antisense
tctgtactccagtctctgaa

SEQ ID NO: 1725 - DNA, 20 bp, artificial
  human GFAT antisense
aacttttcctttcttcttaa

SEQ ID NO: 1726 - DNA, 20 bp, artificial
  human GFAT antisense
ccaaaaactttttcaagtct

SEQ ID NO: 1727 - DNA, 20 bp, artificial
  human GFAT antisense
atccactactgctgcaacat

SEQ ID NO: 1728 - DNA, 20 bp, artificial
  human GFAT antisense
acccaaattcacagtatagt

SEQ ID NO: 1729 - DNA, 20 bp, artificial
  human GFAT antisense
taacttgttccacaagcaat

SEQ ID NO: 1730 - DNA, 20 bp, artificial
  human GFAT antisense
gtaacttgttccacaagcaa

SEQ ID NO: 1731 - DNA, 20 bp, artificial
  human GFAT antisense
caaatcaggcagccgtttca

SEQ ID NO: 1732 - DNA, 20 bp, artificial
  human GFAT antisense
catcaatttatccaccaaag

SEQ ID NO: 1733 - DNA, 20 bp, artificial
  human GFAT antisense
ccagcaactgtaaagggatc

SEQ ID NO: 1734 - DNA, 20 bp, artificial
  human GFAT antisense
gaaagccagcaactgtaaag

SEQ ID NO: 1735 - DNA, 20 bp, artificial
  human GFAT antisense
ttaatcatacagtttcgtac

SEQ ID NO: 1736 - DNA, 20 bp, artificial
  human GFAT antisense
ttcctaaatttcttccacct

SEQ ID NO: 1737 - DNA, 20 bp, artificial
  human GFAT antisense
atacaaggaaataaaaaaca

SEQ ID NO: 1738 - DNA, 20 bp, artificial
  human GFAT antisense
tggctggcgggatcgggggt

SEQ ID NO: 1739 - DNA, 20 bp, artificial
  human GFAT antisense
ttcctttcttcttaataagc

SEQ ID NO: 1740 - DNA, 20 bp, artificial
  human GFAT antisense
ttcccgattgtcatacatat

SEQ ID NO: 1741 - DNA, 20 bp, artificial
  human GFAT antisense
cgtccatccactactgctgc

SEQ ID NO: 1742 - DNA, 20 bp, artificial
  human GFAT antisense
attatcagaactgacttctg

SEQ ID NO: 1743 - DNA, 20 bp, artificial
  human GFAT antisense
gcataagtgtgatctctcat

SEQ ID NO: 1744 - DNA, 20 bp, artificial
  human GFAT antisense
ctgacacttggcataagtgt

SEQ ID NO: 1745 - DNA, 20 bp, artificial
  human GFAT antisense
tttcgtacattttgtataga

SEQ ID NO: 1746 - DNA, 20 bp, artificial
  human GFAT antisense
ttactgggaaaatgtaagag

SEQ ID NO: 1747 - DNA, 20 bp, artificial
  human GFAT antisense
gaaacatattgtcttctcag

SEQ ID NO: 1748 - DNA, 20 bp, artificial
  human GFAT antisense
aatttttagaaacatattgt

SEQ ID NO: 1749 - DNA, 20 bp, artificial
  human GFAT antisense
ttaaatgcactactctttca

SEQ ID NO: 1750 - DNA, 20 bp, artificial
  human GFAT antisense
aaacttggcaaacccttccc

SEQ ID NO: 1751 - DNA, 20 bp, artificial
  human GFAT antisense
gagcttggcaattgtctctg

SEQ ID NO: 1752 - DNA, 20 bp, artificial
  human GFAT antisense
catacatatacttaacgagc

SEQ ID NO: 1753 - DNA, 20 bp, artificial
  human GFAT antisense
ccttccaattgttggataac

SEQ ID NO: 1754 - DNA, 20 bp, artificial
  human GFAT antisense
ccaactgcttgcccgggaaa

SEQ ID NO: 1755 - DNA, 20 bp, artificial
  human GFAT antisense
catcatcttccagaaagatg

SEQ ID NO: 1756 - DNA, 20 bp, artificial
  human GFAT antisense
tctttgcgtctttcttgcat

SEQ ID NO: 1757 - DNA, 20 bp, artificial
  human GFAT antisense
ctgaagagcattctgacact

SEQ ID NO: 1758 - DNA, 20 bp, artificial
  human GFAT antisense
tcacagatttggcaagattc

SEQ ID NO: 1759 - DNA, 20 bp, artificial
  human GFAT antisense
ttttgtatagatattcctca

SEQ ID NO: 1760 - DNA, 20 bp, artificial
  human GFAT antisense
tcaaggttttaaatacaaaa

SEQ ID NO: 1761 - DNA, 20 bp, artificial
  human GFAT antisense
cattattcaaagtcctccac

SEQ ID NO: 1762 - DNA, 20 bp, artificial
  human GFAT antisense
tagctagaatctttctgata

SEQ ID NO: 1763 - DNA, 20 bp, artificial
  human GFAT antisense
ggagggtccagaaatgcaac

SEQ ID NO: 1764 - DNA, 20 bp, artificial
  human GFAT antisense
cagtttgatttaaaaacaaa

SEQ ID NO: 1765 - DNA, 20 bp, artificial
  human GFAT antisense
tacccaacatgtacacatcc

SEQ ID NO: 1766 - DNA, 20 bp, artificial
  human GFAT antisense
gcgggatcgggggtgcacac

SEQ ID NO: 1767 - DNA, 20 bp, artificial
  human GFAT antisense
acacaagtgcaaaagcacct

SEQ ID NO: 1768 - DNA, 20 bp, artificial
  human GFAT antisense
tccactactgctgcaacatc

SEQ ID NO: 1769 - DNA, 20 bp, artificial
  human GFAT antisense
gtgtttgcacagctcgtccg

SEQ ID NO: 1770 - DNA, 20 bp, artificial
  human GFAT antisense
ctctccttacagtaacgaag

SEQ ID NO: 1771 - DNA, 20 bp, artificial
  human GFAT antisense
aaagttctgttgctagtttc

SEQ ID NO: 1772 - DNA, 20 bp, artificial
  human GFAT antisense
caaggatgccttcagagtgc

SEQ ID NO: 1773 - DNA, 20 bp, artificial
  human GFAT antisense
ctcagcacagcaaggtggaa

SEQ ID NO: 1774 - DNA, 20 bp, artificial
  human GFAT antisense
atataaataaggatttacta

SEQ ID NO: 1775 - DNA, 20 bp, artificial
  human GFAT antisense
ttagaaacatattgtcttct

SEQ ID NO: 1776 - DNA, 20 bp, artificial
  human GFAT antisense
tggtgaaacaagtaccaatt

SEQ ID NO: 1777 - DNA, 20 bp, artificial
  human GFAT antisense
ggcaaacccttccctaactg

SEQ ID NO: 1778 - DNA, 20 bp, artificial
  human GFAT antisense
agtttgtgctataaaattgt

SEQ ID NO: 1779 - DNA, 20 bp, artificial
  human GFAT antisense
acgagcttcggtgggcaatc

SEQ ID NO: 1780 - DNA, 20 bp, artificial
  human GFAT antisense
tgcacacacgagcttcggtg

SEQ ID NO: 1781 - DNA, 20 bp, artificial
  human GFAT antisense
catccactactgctgcaaca

SEQ ID NO: 1782 - DNA, 20 bp, artificial
  human GFAT antisense
cccatcaaagtatctgctgt

SEQ ID NO: 1783 - DNA, 20 bp, artificial
  human GFAT antisense
agctcctctctccttacagt

SEQ ID NO: 1784 - DNA, 20 bp, artificial
  human GFAT antisense
gaactccacaatctgtctcc

SEQ ID NO: 1785 - DNA, 20 bp, artificial
  human GFAT antisense
tcaaatcaggcagccgtttc

SEQ ID NO: 1786 - DNA, 20 bp, artificial
  human GFAT antisense
ttctgaatttcgtcatccat

SEQ ID NO: 1787 - DNA, 20 bp, artificial
  human GFAT antisense
atttatccaccaaagccaga

SEQ ID NO: 1788 - DNA, 20 bp, artificial
  human GFAT antisense
ggcaccttgatcgttctttt

SEQ ID NO: 1789 - DNA, 20 bp, artificial
  human GFAT antisense
agtcacagatttggcaagat

SEQ ID NO: 1790 - DNA, 20 bp, artificial
  human GFAT antisense
aaaataatagctagaatctt

SEQ ID NO: 1791 - DNA, 20 bp, artificial
  human GFAT antisense
ttagatactccaattaaatg

SEQ ID NO: 1792 - DNA, 20 bp, artificial
  human GFAT antisense
atatgttaaggattgagacc

SEQ ID NO: 1793 - DNA, 20 bp, artificial
  human GFAT antisense
acacatcccatcttcaaatt

SEQ ID NO: 1794 - DNA, 20 bp, artificial
  human GFAT antisense
tacacatcccatcttcaaat

SEQ ID NO: 1795 - DNA, 20 bp, artificial
  human GFAT antisense
gactacagatacaaggaaat

SEQ ID NO: 1796 - DNA, 20 bp, artificial
  human GFAT antisense
agactacagatacaaggaaa

SEQ ID NO: 1797 - DNA, 20 bp, artificial
  human GFAT antisense
cattgtgaataacgataaat

SEQ ID NO: 1798 - DNA, 20 bp, artificial
  human GFAT antisense
tccaaaaactttttcaagtc

SEQ ID NO: 1799 - DNA, 20 bp, artificial
  human GFAT antisense
ttgcatcagaagcaaagtaa

SEQ ID NO: 1800 - DNA, 20 bp, artificial
  human GFAT antisense
agaaagatgacgcgattggt

SEQ ID NO: 1801 - DNA, 20 bp, artificial
  human GFAT antisense
ttcaaaccacccaaattcac

SEQ ID NO: 1802 - DNA, 20 bp, artificial
  human GFAT antisense
cttacagtaacgaagaccca

SEQ ID NO: 1803 - DNA, 20 bp, artificial
  human GFAT antisense
tatcagaactgacttctgat

SEQ ID NO: 1804 - DNA, 20 bp, artificial
  human GFAT antisense
caagtagcataatgatagcc

SEQ ID NO: 1805 - DNA, 20 bp, artificial
  human GFAT antisense
ccagcaaggatgccttcaga

SEQ ID NO: 1806 - DNA, 20 bp, artificial
  human GFAT antisense
ttatccaccaaagccagagg

SEQ ID NO: 1807 - DNA, 20 bp, artificial
  human GFAT antisense
tttatccaccaaagccagag

SEQ ID NO: 1808 - DNA, 20 bp, artificial
  human GFAT antisense
acaggccgcccctgccgagc

SEQ ID NO: 1809 - DNA, 20 bp, artificial
  human GFAT antisense
cagcacagcaaggtggaaag

SEQ ID NO: 1810 - DNA, 20 bp, artificial
  human GFAT antisense
tggcaagattccgtgggaaa

SEQ ID NO: 1811 - DNA, 20 bp, artificial
  human GFAT antisense
tcacatattgagtggaataa

SEQ ID NO: 1812 - DNA, 20 bp, artificial
  human GFAT antisense
ggtaacttcacaaaaatcac

SEQ ID NO: 1813 - DNA, 20 bp, artificial
  human GFAT antisense
caaagtcctccacaaattac

SEQ ID NO: 1814 - DNA, 20 bp, artificial
  human GFAT antisense
atgaagtatggtgaaacaag

SEQ ID NO: 1815 - DNA, 20 bp, artificial
  human GFAT antisense
actgtaatatttcgcttcct

SEQ ID NO: 1816 - DNA, 20 bp, artificial
  human GFAT antisense
gatacccaacatgtacacat

SEQ ID NO: 1817 - DNA, 20 bp, artificial
  human GFAT antisense
ctccagtctctgaaggcctt

SEQ ID NO: 1818 - DNA, 20 bp, artificial
  human GFAT antisense
tccatatcttgttgcttgtg

SEQ ID NO: 1819 - DNA, 20 bp, artificial
  human GFAT antisense
ttccaaaaactttttcaagt

SEQ ID NO: 1820 - DNA, 20 bp, artificial
  human GFAT antisense
cttggcaattgtctctgtgt

SEQ ID NO: 1821 - DNA, 20 bp, artificial
  human GFAT antisense
cacaagtgcaaaagcacctt

SEQ ID NO: 1822 - DNA, 20 bp, artificial
  human GFAT antisense
cttgtctttgcctgttctgt

SEQ ID NO: 1823 - DNA, 20 bp, artificial
  human GFAT antisense
gcagcttcctttcttgtctt

SEQ ID NO: 1824 - DNA, 20 bp, artificial
  human GFAT antisense
attgcagcttcctttcttgt

SEQ ID NO: 1825 - DNA, 20 bp, artificial
  human GFAT antisense
gttcacgacagactctggct

SEQ ID NO: 1826 - DNA, 20 bp, artificial
  human GFAT antisense
atgtgatccttcaaaccacc

SEQ ID NO: 1827 - DNA, 20 bp, artificial
  human GFAT antisense
atccccacagttaaagctcc

SEQ ID NO: 1828 - DNA, 20 bp, artificial
  human GFAT antisense
tgatccccacagttaaagct

SEQ ID NO: 1829 - DNA, 20 bp, artificial
  human GFAT antisense
cgtcccattatcagaactga

SEQ ID NO: 1830 - DNA, 20 bp, artificial
  human GFAT antisense
agtggggcaccttgatcgtt

SEQ ID NO: 1831 - DNA, 20 bp, artificial
  human GFAT antisense
gatcacgctgagaatgccct

SEQ ID NO: 1832 - DNA, 20 bp, artificial
  human GFAT antisense
aaagggatcacgctgagaat

SEQ ID NO: 1833 - DNA, 20 bp, artificial
  human GFAT antisense
aaaataaatcacatcttctc

SEQ ID NO: 1834 - DNA, 20 bp, artificial
  human GFAT antisense
agatataaatcctaccaata

SEQ ID NO: 1835 - DNA, 20 bp, artificial
  human GFAT antisense
taaatttcttccacctacag

SEQ ID NO: 1836 - DNA, 20 bp, artificial
  human GFAT antisense
ttgtgcaaatatgttaagga

SEQ ID NO: 1837 - DNA, 20 bp, artificial
  human GFAT antisense
tgctataaaattgtgcaaat

SEQ ID NO: 1838 - DNA, 20 bp, artificial
  human GFAT antisense
taaaatcatattgtcagttg

SEQ ID NO: 1839 - DNA, 20 bp, artificial
  human GFAT antisense
gtacacatcccatcttcaaa

SEQ ID NO: 1840 - DNA, 20 bp, artificial
  human GFAT antisense
actacagatacaaggaaata

SEQ ID NO: 1841 - DNA, 20 bp, artificial
  human GFAT antisense
cgttcgaggaacatggtagt

SEQ ID NO: 1842 - DNA, 20 bp, artificial
  human GFAT antisense
caaggtgtacatcaaattct

SEQ ID NO: 1843 - DNA, 20 bp, artificial
  human GFAT antisense
acgagcttggcaattgtctc

SEQ ID NO: 1844 - DNA, 20 bp, artificial
  human GFAT antisense
ctgtccacacgagagagatt

SEQ ID NO: 1845 - DNA, 20 bp, artificial
  human GFAT antisense
caggttgtgctgtccacacg

SEQ ID NO: 1846 - DNA, 20 bp, artificial
  human GFAT antisense
ggagtgtttgcacagctcgt

SEQ ID NO: 1847 - DNA, 20 bp, artificial
  human GFAT antisense
tctggctgctcaaatatttc

SEQ ID NO: 1848 - DNA, 20 bp, artificial
  human GFAT antisense
tgtgatccttcaaaccaccc

SEQ ID NO: 1849 - DNA, 20 bp, artificial
  human GFAT antisense
cctttatgtgatccttcaaa

SEQ ID NO: 1850 - DNA, 20 bp, artificial
  human GFAT antisense
tggctggtataagcctttgt

SEQ ID NO: 1851 - DNA, 20 bp, artificial
  human GFAT antisense
tcgtcatccatgctcagtac

SEQ ID NO: 1852 - DNA, 20 bp, artificial
  human GFAT antisense
atagcctcgtcccattatca

SEQ ID NO: 1853 - DNA, 20 bp, artificial
  human GFAT antisense
tctcatgatgatcatgatca

SEQ ID NO: 1854 - DNA, 20 bp, artificial
  human GFAT antisense
acagcaaggtggaaagccag

SEQ ID NO: 1855 - DNA, 20 bp, artificial
  human GFAT antisense
gctagaatctttctgataca

SEQ ID NO: 1856 - DNA, 20 bp, artificial
  human GFAT antisense
atggtgaaacaagtaccaat

SEQ ID NO: 1857 - DNA, 20 bp, artificial
  human GFAT antisense
gtatggtgaaacaagtacca

SEQ ID NO: 1858 - DNA, 20 bp, artificial
  human GFAT antisense
tcttctcttaaaacttggca

SEQ ID NO: 1859 - DNA, 20 bp, artificial
  human GFAT antisense
agtctgagaaactaaggcta

SEQ ID NO: 1860 - DNA, 20 bp, artificial
  human GFAT antisense
ctactgtaatatttcgcttc

SEQ ID NO: 1861 - DNA, 20 bp, artificial
  human GFAT antisense
ccaccaatgcactactgtaa

SEQ ID NO: 1862 - DNA, 20 bp, artificial
  human GFAT antisense
caaatttaaaatcatattgt

SEQ ID NO: 1863 - DNA, 20 bp, artificial
  human GFAT antisense
ataaaaaacacttttaggag

SEQ ID NO: 1864 - DNA, 20 bp, artificial
  human GFAT antisense
agcttcggtgggcaatctgc

SEQ ID NO: 1865 - DNA, 20 bp, artificial
  human GFAT antisense
ttccaattgttggataactc

SEQ ID NO: 1866 - DNA, 20 bp, artificial
  human GFAT antisense
tgatcagtagaaagtttatg

SEQ ID NO: 1867 - DNA, 20 bp, artificial
  human GFAT antisense
ctactgctgcaacatcatca

SEQ ID NO: 1868 - DNA, 20 bp, artificial
  human GFAT antisense
tttgcacagctcgtccgggg

SEQ ID NO: 1869 - DNA, 20 bp, artificial
  human GFAT antisense
actctggctgctcaaatatt

SEQ ID NO: 1870 - DNA, 20 bp, artificial
  human GFAT antisense
caaaccacccaaattcacag

SEQ ID NO: 1871 - DNA, 20 bp, artificial
  human GFAT antisense
acttgttccacaagcaataa

SEQ ID NO: 1872 - DNA, 20 bp, artificial
  human GFAT antisense
agtcagctcctcaagaactt

SEQ ID NO: 1873 - DNA, 20 bp, artificial
  human GFAT antisense
acagtaacgaagacccatca

SEQ ID NO: 1874 - DNA, 20 bp, artificial
  human GFAT antisense
ttcgtcatccatgctcagta

SEQ ID NO: 1875 - DNA, 20 bp, artificial
  human GFAT antisense
tctgttgctagtttctgaat

SEQ ID NO: 1876 - DNA, 20 bp, artificial
  human GFAT antisense
ttatcagaactgacttctga

SEQ ID NO: 1877 - DNA, 20 bp, artificial
  human GFAT antisense
tcgtcccattatcagaactg

SEQ ID NO: 1878 - DNA, 20 bp, artificial
  human GFAT antisense
aagattccgtgggaaatcaa

SEQ ID NO: 1879 - DNA, 20 bp, artificial
  human GFAT antisense
cgtacattttgtatagatat

SEQ ID NO: 1880 - DNA, 20 bp, artificial
  human GFAT antisense
cttctcagattgaagtggag

SEQ ID NO: 1881 - DNA, 20 bp, artificial
  human GFAT antisense
aaatcacatcttctcttaaa

SEQ ID NO: 1882 - DNA, 20 bp, artificial
  human GFAT antisense
gcactactgtaatatttcgc

SEQ ID NO: 1883 - DNA, 20 bp, artificial
  human GFAT antisense
atgatgccggagacacggcc

SEQ ID NO: 1884 - DNA, 20 bp, artificial
  human GFAT antisense
cccaatctttatcattgcct

SEQ ID NO: 1885 - DNA, 20 bp, artificial
  human GFAT antisense
gggggtggctattgacagga

SEQ ID NO: 1886 - DNA, 20 bp, artificial
  human GFAT antisense
ggttgtgctgtccacacgag

SEQ ID NO: 1887 - DNA, 20 bp, artificial
  human GFAT antisense
aggttgtgctgtccacacga

SEQ ID NO: 1888 - DNA, 20 bp, artificial
  human GFAT antisense
gatggatagaaagacgtcca

SEQ ID NO: 1889 - DNA, 20 bp, artificial
  human GFAT antisense
ctctggctgctcaaatattt

SEQ ID NO: 1890 - DNA, 20 bp, artificial
  human GFAT antisense
actgccaactgtgtttgtga

SEQ ID NO: 1891 - DNA, 20 bp, artificial
  human GFAT antisense
cttatcacaaattaccacag

SEQ ID NO: 1892 - DNA, 20 bp, artificial
  human GFAT antisense
ccaagtatgagcatacactg

SEQ ID NO: 1893 - DNA, 20 bp, artificial
  human GFAT antisense
tagatataaatcctaccaat

SEQ ID NO: 1894 - DNA, 20 bp, artificial
  human GFAT antisense
cacttttaggagatgaaaac

SEQ ID NO: 1895 - DNA, 20 bp, artificial
  human GFAT antisense
gtgttgtgattttaaagaac

SEQ ID NO: 1896 - DNA, 20 bp, artificial
  human GFAT antisense
agtggctggcgggatcgggg

SEQ ID NO: 1897 - DNA, 20 bp, artificial
  human GFAT antisense
gttcgaggaacatggtagtt

SEQ ID NO: 1898 - DNA, 20 bp, artificial
  human GFAT antisense
tttccaaaaactttttcaag

SEQ ID NO: 1899 - DNA, 20 bp, artificial
  human GFAT antisense
cgtcatccatgctcagtact

SEQ ID NO: 1900 - DNA, 20 bp, artificial
  human GFAT antisense
agttctgttgctagtttctg

SEQ ID NO: 1901 - DNA, 20 bp, artificial
  human GFAT antisense
taaagttctgttgctagttt

SEQ ID NO: 1902 - DNA, 20 bp, artificial
  human GFAT antisense
caccttgatcgttctttttg

SEQ ID NO: 1903 - DNA, 20 bp, artificial
  human GFAT antisense
attttgtatagatattcctc

SEQ ID NO: 1904 - DNA, 20 bp, artificial
  human GFAT antisense
attattcaaagtcctccaca

SEQ ID NO: 1905 - DNA, 20 bp, artificial
  human GFAT antisense
tatggtgaaacaagtaccaa

SEQ ID NO: 1906 - DNA, 20 bp, artificial
  human GFAT antisense
tttgatttaaaaacaaaaca

SEQ ID NO: 1907 - DNA, 20 bp, artificial
  human GFAT antisense
aaatttaaaatcatattgtc

SEQ ID NO: 1908 - DNA, 20 bp, artificial
  human GFAT antisense
taaaagactacagatacaag

SEQ ID NO: 1909 - DNA, 20 bp, artificial
  human GFAT antisense
ataaaagactacagatacaa

SEQ ID NO: 1910 - DNA, 20 bp, artificial
  human GFAT antisense
aataaaagactacagataca

SEQ ID NO: 1911 - DNA, 20 bp, artificial
  human GFAT antisense
acgccggcatctctggatct

SEQ ID NO: 1912 - DNA, 20 bp, artificial
  human GFAT antisense
ggtataagcctttgtactgg

SEQ ID NO: 1913 - DNA, 20 bp, artificial
  human GFAT antisense
gggcaaacatcacaagggat

SEQ ID NO: 1914 - DNA, 20 bp, artificial
  human GFAT antisense
cgcccctgccgagcaaccac

SEQ ID NO: 1915 - DNA, 20 bp, artificial
  human GFAT antisense
gattgaagtggagggtccag

SEQ ID NO: 1916 - DNA, 20 bp, artificial
  human GFAT antisense
gatttaaaaacaaaacagaa

SEQ ID NO: 1917 - DNA, 20 bp, artificial
  human GFAT antisense
gtttgatttaaaaacaaaac

SEQ ID NO: 1918 - DNA, 20 bp, artificial
  human GFAT antisense
tactgtaatatttcgcttcc

SEQ ID NO: 1919 - DNA, 20 bp, artificial
  human GFAT antisense
ataaaattgtgcaaatatgt

SEQ ID NO: 1920 - DNA, 20 bp, artificial
  human GFAT antisense
tgtgttgtgattttaaagaa

SEQ ID NO: 1921 - DNA, 20 bp, artificial
  human GFAT antisense
gtccacacgagagagattgc

SEQ ID NO: 1922 - DNA, 20 bp, artificial
  human GFAT antisense
ccatccactactgctgcaac

SEQ ID NO: 1923 - DNA, 20 bp, artificial
  human GFAT antisense
actggtgtgtttctgtccag

SEQ ID NO: 1924 - DNA, 20 bp, artificial
  human GFAT antisense
aacgaagacccatcaaagta

SEQ ID NO: 1925 - DNA, 20 bp, artificial
  human GFAT antisense
tagcctcgtcccattatcag

SEQ ID NO: 1926 - DNA, 20 bp, artificial
  human GFAT antisense
attcaccagcaaggatgcct

SEQ ID NO: 1927 - DNA, 20 bp, artificial
  human GFAT antisense
cattttgtatagatattcct

SEQ ID NO: 1928 - DNA, 20 bp, artificial
  human GFAT antisense
tcaaagtcctccacaaatta

SEQ ID NO: 1929 - DNA, 20 bp, artificial
  human GFAT antisense
tagatactccaattaaatgc

SEQ ID NO: 1930 - DNA, 20 bp, artificial
  human GFAT antisense
taggagatgaaaacacaaag

SEQ ID NO: 1931 - DNA, 20 bp, artificial
  human GFAT antisense
aagactacagatacaaggaa

SEQ ID NO: 1932 - DNA, 20 bp, artificial
  human GFAT antisense
cgggatcgggggtgcacaca

SEQ ID NO: 1933 - DNA, 20 bp, artificial
  human GFAT antisense
ccaaggtgtacatcaaattc

SEQ ID NO: 1934 - DNA, 20 bp, artificial
  human GFAT antisense
cttccaattgttggataact

SEQ ID NO: 1935 - DNA, 20 bp, artificial
  human GFAT antisense
catctggagtgtttgcacag

SEQ ID NO: 1936 - DNA, 20 bp, artificial
  human GFAT antisense
gtgatccttcaaaccaccca

SEQ ID NO: 1937 - DNA, 20 bp, artificial
  human GFAT antisense
ataagaatcaaacgccggca

SEQ ID NO: 1938 - DNA, 20 bp, artificial
  human GFAT antisense
ctcagtcagctcctcaagaa

SEQ ID NO: 1939 - DNA, 20 bp, artificial
  human GFAT antisense
actcagtcagctcctcaaga

SEQ ID NO: 1940 - DNA, 20 bp, artificial
  human GFAT antisense
tctctttgcgtctttcttgc

SEQ ID NO: 1941 - DNA, 20 bp, artificial
  human GFAT antisense
gtcccattatcagaactgac

SEQ ID NO: 1942 - DNA, 20 bp, artificial
  human GFAT antisense
ccatgtttcaattcaccagc

SEQ ID NO: 1943 - DNA, 20 bp, artificial
  human GFAT antisense
tatataaataaggatttact

SEQ ID NO: 1944 - DNA, 20 bp, artificial
  human GFAT antisense
tgcaacacccagcattcttt

SEQ ID NO: 1945 - DNA, 20 bp, artificial
  human GFAT antisense
tgaagtatggtgaaacaagt

SEQ ID NO: 1946 - DNA, 20 bp, artificial
  human GFAT antisense
ctgtgttgtgattttaaaga

SEQ ID NO: 1947 - DNA, 20 bp, artificial
  human GFAT antisense
ggcgggatcgggggtgcaca

SEQ ID NO: 1948 - DNA, 20 bp, artificial
  human GFAT antisense
ggccaggggcgagtggctgg

SEQ ID NO: 1949 - DNA, 20 bp, artificial
  human GFAT antisense
catatcttgttgcttgtgaa

SEQ ID NO: 1950 - DNA, 20 bp, artificial
  human GFAT antisense
caaaaactttttcaagtctt

SEQ ID NO: 1951 - DNA, 20 bp, artificial
  human GFAT antisense
tacttaacgagcttggcaat

SEQ ID NO: 1952 - DNA, 20 bp, artificial
  human GFAT antisense
tcccgattgtcatacatata

SEQ ID NO: 1953 - DNA, 20 bp, artificial
  human GFAT antisense
cccaaattcacagtatagtc

SEQ ID NO: 1954 - DNA, 20 bp, artificial
  human GFAT antisense
gtgatccccacagttaaagc

SEQ ID NO: 1955 - DNA, 20 bp, artificial
  human GFAT antisense
atcaaatcaggcagccgttt

SEQ ID NO: 1956 - DNA, 20 bp, artificial
  human GFAT antisense
ataaagttctgttgctagtt

SEQ ID NO: 1957 - DNA, 20 bp, artificial
  human GFAT antisense
tcaattcaccagcaaggatg

SEQ ID NO: 1958 - DNA, 20 bp, artificial
  human GFAT antisense
tgtttcaattcaccagcaag

SEQ ID NO: 1959 - DNA, 20 bp, artificial
  human GFAT antisense
gtgatctctcatgatgatca

SEQ ID NO: 1960 - DNA, 20 bp, artificial
  human GFAT antisense
cacaaattaccacaggccgc

SEQ ID NO: 1961 - DNA, 20 bp, artificial
  human GFAT antisense
cagtcacagatttggcaaga

SEQ ID NO: 1962 - DNA, 20 bp, artificial
  human GFAT antisense
agctagaatctttctgatac

SEQ ID NO: 1963 - DNA, 20 bp, artificial
  human GFAT antisense
gggtccagaaatgcaacacc

SEQ ID NO: 1964 - DNA, 20 bp, artificial
  human GFAT antisense
gacccaccaatgcactactg

SEQ ID NO: 1965 - DNA, 20 bp, artificial
  human GFAT antisense
ttaaaatcatattgtcagtt

SEQ ID NO: 1966 - DNA, 20 bp, artificial
  human GFAT antisense
aataaaaaacacttttagga

SEQ ID NO: 1967 - DNA, 20 bp, artificial
  human GFAT antisense
aatttaatagcagctctgtg

SEQ ID NO: 1968 - DNA, 20 bp, artificial
  human GFAT antisense
ttcgaggaacatggtagttt

SEQ ID NO: 1969 - DNA, 20 bp, artificial
  human GFAT antisense
ataaattcattatttttatc

SEQ ID NO: 1970 - DNA, 20 bp, artificial
  human GFAT antisense
aatgaacacttttaaacaca

SEQ ID NO: 1971 - DNA, 20 bp, artificial
  human GFAT antisense
acacgagagagattgcagct

SEQ ID NO: 1972 - DNA, 20 bp, artificial
  human GFAT antisense
ctatgacagcacttgcatca

SEQ ID NO: 1973 - DNA, 20 bp, artificial
  human GFAT antisense
agatgacgcgattggtgtgt

SEQ ID NO: 1974 - DNA, 20 bp, artificial
  human GFAT antisense
cgatggatagaaagacgtcc

SEQ ID NO: 1975 - DNA, 20 bp, artificial
  human GFAT antisense
tgtgatccccacagttaaag

SEQ ID NO: 1976 - DNA, 20 bp, artificial
  human GFAT antisense
ggcataagtgtgatctctca

SEQ ID NO: 1977 - DNA, 20 bp, artificial
  human GFAT antisense
atttttagaaacatattgtc

SEQ ID NO: 1978 - DNA, 20 bp, artificial
  human GFAT antisense
gaggaacatggtagtttaag

SEQ ID NO: 1979 - DNA, 20 bp, artificial
  human GFAT antisense
tcaaatcccacaccagcaga

SEQ ID NO: 1980 - DNA, 20 bp, artificial
  human GFAT antisense
gctgtccacacgagagagat

SEQ ID NO: 1981 - DNA, 20 bp, artificial
  human GFAT antisense
aaaaggcaggttgtgctgtc

SEQ ID NO: 1982 - DNA, 20 bp, artificial
  human GFAT antisense
gggaaaaggcaggttgtgct

SEQ ID NO: 1983 - DNA, 20 bp, artificial
  human GFAT antisense
acgaagacccatcaaagtat

SEQ ID NO: 1984 - DNA, 20 bp, artificial
  human GFAT antisense
agtaacgaagacccatcaaa

SEQ ID NO: 1985 - DNA, 20 bp, artificial
  human GFAT antisense
ttctgttgctagtttctgaa

SEQ ID NO: 1986 - DNA, 20 bp, artificial
  human GFAT antisense
ctcgtcccattatcagaact

SEQ ID NO: 1987 - DNA, 20 bp, artificial
  human GFAT antisense
agcacagcaaggtggaaagc

SEQ ID NO: 1988 - DNA, 20 bp, artificial
  human GFAT antisense
agaggtaacttcacaaaaat

SEQ ID NO: 1989 - DNA, 20 bp, artificial
  human GFAT antisense
aagtcctccacaaattactg

SEQ ID NO: 1990 - DNA, 20 bp, artificial
  human GFAT antisense
gtgaaacaagtaccaatttt

SEQ ID NO: 1991 - DNA, 20 bp, artificial
  human GFAT antisense
atactccaattaaatgcact

SEQ ID NO: 1992 - DNA, 20 bp, artificial
  human GFAT antisense
taaatcacatcttctcttaa

SEQ ID NO: 1993 - DNA, 20 bp, artificial
  human GFAT antisense
aaattgtgcaaatatgttaa

SEQ ID NO: 1994 - DNA, 20 bp, artificial
  human GFAT antisense
tttgtgctataaaattgtgc

SEQ ID NO: 1995 - DNA, 20 bp, artificial
  human GFAT antisense
gcgagtggctggcgggatcg

SEQ ID NO: 1996 - DNA, 20 bp, artificial
  human GFAT antisense
tcgttcgaggaacatggtag

SEQ ID NO: 1997 - DNA, 20 bp, artificial
  human GFAT antisense
acaccagcagaatcatatcc

SEQ ID NO: 1998 - DNA, 20 bp, artificial
  human GFAT antisense
aatccatatcttgttgcttg

SEQ ID NO: 1999 - DNA, 20 bp, artificial
  human GFAT antisense
ctttgctttccaaaaacttt

SEQ ID NO: 2000 - DNA, 20 bp, artificial
  human GFAT antisense
caaggtagtaaagctggtat

SEQ ID NO: 2001 - DNA, 20 bp, artificial
  human GFAT antisense
caatcaacagagggctacct

SEQ ID NO: 2002 - DNA, 20 bp, artificial
  human GFAT antisense
accaatcaacagagggctac

SEQ ID NO: 2003 - DNA, 20 bp, artificial
  human GFAT antisense
ttatgttcactccgtacacc

SEQ ID NO: 2004 - DNA, 20 bp, artificial
  human GFAT antisense
ccacacgagagagattgcag

SEQ ID NO: 2005 - DNA, 20 bp, artificial
  human GFAT antisense
tgtccacacgagagagattg

SEQ ID NO: 2006 - DNA, 20 bp, artificial
  human GFAT antisense
ctcctctctccttacagtaa

SEQ ID NO: 2007 - DNA, 20 bp, artificial
  human GFAT antisense
aatctcaggaccagcattaa

SEQ ID NO: 2008 - DNA, 20 bp, artificial
  human GFAT antisense
agcctcgtcccattatcaga

SEQ ID NO: 2009 - DNA, 20 bp, artificial
  human GFAT antisense
tataactgatatataaataa

SEQ ID NO: 2010 - DNA, 20 bp, artificial
  human GFAT antisense
tgaagtggagggtccagaaa

SEQ ID NO: 2011 - DNA, 20 bp, artificial
  human GFAT antisense
actccaattaaatgcactac

SEQ ID NO: 2012 - DNA, 20 bp, artificial
  human GFAT antisense
caaaataaatcacatcttct

SEQ ID NO: 2013 - DNA, 20 bp, artificial
  human GFAT antisense
actaaggctaaccaaactta

SEQ ID NO: 2014 - DNA, 20 bp, artificial
  human GFAT antisense
atacccaacatgtacacatc

SEQ ID NO: 2015 - DNA, 20 bp, artificial
  human GFAT antisense
cgagtggctggcgggatcgg

SEQ ID NO: 2016 - DNA, 20 bp, artificial
  human GFAT antisense
tccagtctctgaaggccttt

SEQ ID NO: 2017 - DNA, 20 bp, artificial
  human GFAT antisense
aaggtgtacatcaaattcta

SEQ ID NO: 2018 - DNA, 20 bp, artificial
  human GFAT antisense
aaaactttttcaagtctttg

SEQ ID NO: 2019 - DNA, 20 bp, artificial
  human GFAT antisense
gatcagtagaaagtttatgt

SEQ ID NO: 2020 - DNA, 20 bp, artificial
  human GFAT antisense
tctatgacagcacttgcatc

SEQ ID NO: 2021 - DNA, 20 bp, artificial
  human GFAT antisense
caacatcatcatcttccaga

SEQ ID NO: 2022 - DNA, 20 bp, artificial
  human GFAT antisense
ccttcaaaccacccaaattc

SEQ ID NO: 2023 - DNA, 20 bp, artificial
  human GFAT antisense
ttgacgtgttgctacaccag

SEQ ID NO: 2024 - DNA, 20 bp, artificial
  human GFAT antisense
caaagtatctgctgtctcac

SEQ ID NO: 2025 - DNA, 20 bp, artificial
  human GFAT antisense
gctcctctctccttacagta

SEQ ID NO: 2026 - DNA, 20 bp, artificial
  human GFAT antisense
gctagtttctgaatttcgtc

SEQ ID NO: 2027 - DNA, 20 bp, artificial
  human GFAT antisense
agcattctgacacttggcat

SEQ ID NO: 2028 - DNA, 20 bp, artificial
  human GFAT antisense
gtggggcaccttgatcgttc

SEQ ID NO: 2029 - DNA, 20 bp, artificial
  human GFAT antisense
ggaaagccagcaactgtaaa

SEQ ID NO: 2030 - DNA, 20 bp, artificial
  human GFAT antisense
tcagcacagcaaggtggaaa

SEQ ID NO: 2031 - DNA, 20 bp, artificial
  human GFAT antisense
catacagtttcgtacatttt

SEQ ID NO: 2032 - DNA, 20 bp, artificial
  human GFAT antisense
gaaaataatagctagaatct

SEQ ID NO: 2033 - DNA, 20 bp, artificial
  human GFAT antisense
tgtgcaaatatgttaaggat

SEQ ID NO: 2034 - DNA, 20 bp, artificial
  human GFAT antisense
taaaattgtgcaaatatgtt

SEQ ID NO: 2035 - DNA, 20 bp, artificial
  human GFAT antisense
ggctggcgggatcgggggtg

SEQ ID NO: 2036 - DNA, 20 bp, artificial
  human GFAT antisense
ccacaccagcagaatcatat

SEQ ID NO: 2037 - DNA, 20 bp, artificial
  human GFAT antisense
ccaatctttatcattgcctc

SEQ ID NO: 2038 - DNA, 20 bp, artificial
  human GFAT antisense
gaataacgataaattcatta

SEQ ID NO: 2039 - DNA, 20 bp, artificial
  human GFAT antisense
gcaggttgtgctgtccacac

SEQ ID NO: 2040 - DNA, 20 bp, artificial
  human GFAT antisense
tcctctctccttacagtaac

SEQ ID NO: 2041 - DNA, 20 bp, artificial
  human GFAT antisense
acaatctgtctcccgtgata

SEQ ID NO: 2042 - DNA, 20 bp, artificial
  human GFAT antisense
agggcaaacatcacaaggga

SEQ ID NO: 2043 - DNA, 20 bp, artificial
  human GFAT antisense
ttcaaagtcctccacaaatt

SEQ ID NO: 2044 - DNA, 20 bp, artificial
  human GFAT antisense
ctaaatttcttccacctaca

SEQ ID NO: 2045 - DNA, 20 bp, artificial
  human GFAT antisense
agctctgtgttgtgatttta

SEQ ID NO: 2046 - DNA, 20 bp, artificial
  human GFAT antisense
cccgggaaaatgaacacttt

SEQ ID NO: 2047 - DNA, 20 bp, artificial
  human GFAT antisense
tgcccgggaaaatgaacact

SEQ ID NO: 2048 - DNA, 20 bp, artificial
  human GFAT antisense
gtataggaatgtgatcagta

SEQ ID NO: 2049 - DNA, 20 bp, artificial
  human GFAT antisense
tcacgacagactctggctgc

SEQ ID NO: 2050 - DNA, 20 bp, artificial
  human GFAT antisense
tcaaaccacccaaattcaca

SEQ ID NO: 2051 - DNA, 20 bp, artificial
  human GFAT antisense
ccacaagcaataagaatcaa

SEQ ID NO: 2052 - DNA, 20 bp, artificial
  human GFAT antisense
gaagacccatcaaagtatct

SEQ ID NO: 2053 - DNA, 20 bp, artificial
  human GFAT antisense
cagtaacgaagacccatcaa

SEQ ID NO: 2054 - DNA, 20 bp, artificial
  human GFAT antisense
gccccttcaagacaagtagc

SEQ ID NO: 2055 - DNA, 20 bp, artificial
  human GFAT antisense
gagtgcatataagtaatttc

SEQ ID NO: 2056 - DNA, 20 bp, artificial
  human GFAT antisense
cagtttcgtacattttgtat

SEQ ID NO: 2057 - DNA, 20 bp, artificial
  human GFAT antisense
ttataactgatatataaata

SEQ ID NO: 2058 - DNA, 20 bp, artificial
  human GFAT antisense
ttaaaacttggcaaaccctt

SEQ ID NO: 2059 - DNA, 20 bp, artificial
  human GFAT antisense
cttctcttaaaacttggcaa

SEQ ID NO: 2060 - DNA, 20 bp, artificial
  human GFAT antisense
aagtctgagaaactaaggct

SEQ ID NO: 2061 - DNA, 20 bp, artificial
  human GFAT antisense
tggcgggatcgggggtgcac

SEQ ID NO: 2062 - DNA, 20 bp, artificial
  human GFAT antisense
aagtgcaaaagcaccttcca

SEQ ID NO: 2063 - DNA, 20 bp, artificial
  human GFAT antisense
caagtgcaaaagcaccttcc

SEQ ID NO: 2064 - DNA, 20 bp, artificial
  human GFAT antisense
cacttttaaacacaagtgca

SEQ ID NO: 2065 - DNA, 20 bp, artificial
  human GFAT antisense
acaccaatcaacagagggct

SEQ ID NO: 2066 - DNA, 20 bp, artificial
  human GFAT antisense
tccacacgagagagattgca

SEQ ID NO: 2067 - DNA, 20 bp, artificial
  human GFAT antisense
cttgcatcagaagcaaagta

SEQ ID NO: 2068 - DNA, 20 bp, artificial
  human GFAT antisense
ttctatgacagcacttgcat

SEQ ID NO: 2069 - DNA, 20 bp, artificial
  human GFAT antisense
ttggtgtgttctatgacagc

SEQ ID NO: 2070 - DNA, 20 bp, artificial
  human GFAT antisense
aacttgttccacaagcaata

SEQ ID NO: 2071 - DNA, 20 bp, artificial
  human GFAT antisense
caatctgtctcccgtgatat

SEQ ID NO: 2072 - DNA, 20 bp, artificial
  human GFAT antisense
tctttcttgcatggagatcc

SEQ ID NO: 2073 - DNA, 20 bp, artificial
  human GFAT antisense
ccaagcatgatctctttgcg

SEQ ID NO: 2074 - DNA, 20 bp, artificial
  human GFAT antisense
atccaagcatgatctctttg

SEQ ID NO: 2075 - DNA, 20 bp, artificial
  human GFAT antisense
tgctagtttctgaatttcgt

SEQ ID NO: 2076 - DNA, 20 bp, artificial
  human GFAT antisense
ctgccgagcaaccacttgct

SEQ ID NO: 2077 - DNA, 20 bp, artificial
  human GFAT antisense
ctgcaagcagtccactgagt

SEQ ID NO: 2078 - DNA, 20 bp, artificial
  human GFAT antisense
atctttctgatacagattcc

SEQ ID NO: 2079 - DNA, 20 bp, artificial
  human GFAT antisense
tgtacacatcccatcttcaa

SEQ ID NO: 2080 - DNA, 20 bp, artificial
  human GFAT antisense
atcaaatcccacaccagcag

SEQ ID NO: 2081 - DNA, 20 bp, artificial
  human GFAT antisense
ggcttcccaatctttatcat

SEQ ID NO: 2082 - DNA, 20 bp, artificial
  human GFAT antisense
aggtgtacatcaaattctat

SEQ ID NO: 2083 - DNA, 20 bp, artificial
  human GFAT antisense
tccacaatctgtctcccgtg

SEQ ID NO: 2084 - DNA, 20 bp, artificial
  human GFAT antisense
ggctggtataagcctttgta

SEQ ID NO: 2085 - DNA, 20 bp, artificial
  human GFAT antisense
gcaacacccagcattcttta

SEQ ID NO: 2086 - DNA, 20 bp, artificial
  human GFAT antisense
tttaaaaacaaaacagaaac

SEQ ID NO: 2087 - DNA, 20 bp, artificial
  human GFAT antisense
ccaacatgtacacatcccat

SEQ ID NO: 2088 - DNA, 20 bp, artificial
  human GFAT antisense
aaagactacagatacaagga

SEQ ID NO: 2089 - DNA, 20 bp, artificial
  human GFAT antisense
tggataactctctccaccaa

SEQ ID NO: 2090 - DNA, 20 bp, artificial
  human GFAT antisense
acaagtgcaaaagcaccttc

SEQ ID NO: 2091 - DNA, 20 bp, artificial
  human GFAT antisense
catcagaagcaaagtaatac

SEQ ID NO: 2092 - DNA, 20 bp, artificial
  human GFAT antisense
gtccatccactactgctgca

SEQ ID NO: 2093 - DNA, 20 bp, artificial
  human GFAT antisense
gatccttcaaaccacccaaa

SEQ ID NO: 2094 - DNA, 20 bp, artificial
  human GFAT antisense
ttatgtgatccttcaaacca

SEQ ID NO: 2095 - DNA, 20 bp, artificial
  human GFAT antisense
ctgatgataaagttctgttg

SEQ ID NO: 2096 - DNA, 20 bp, artificial
  human GFAT antisense
tgaagagcattctgacactt

SEQ ID NO: 2097 - DNA, 20 bp, artificial
  human GFAT antisense
agtggaataattataactga

SEQ ID NO: 2098 - DNA, 20 bp, artificial
  human GFAT antisense
aagaggtaacttcacaaaaa

SEQ ID NO: 2099 - DNA, 20 bp, artificial
  human GFAT antisense
ttctcttaaaacttggcaaa

SEQ ID NO: 2100 - DNA, 20 bp, artificial
  human GFAT antisense
agtttgatttaaaaacaaaa

SEQ ID NO: 2101 - DNA, 20 bp, artificial
  human GFAT antisense
aactaaggctaaccaaactt

SEQ ID NO: 2102 - DNA, 20 bp, artificial
  human GFAT antisense
tcctttcttcttaataagct

SEQ ID NO: 2103 - DNA, 20 bp, artificial
  human GFAT antisense
aactgccaactgtgtttgtg

SEQ ID NO: 2104 - DNA, 20 bp, artificial
  human GFAT antisense
ctggctggtataagcctttg

SEQ ID NO: 2105 - DNA, 20 bp, artificial
  human GFAT antisense
atcaatttatccaccaaagc

SEQ ID NO: 2106 - DNA, 20 bp, artificial
  human GFAT antisense
tttgtatagatattcctcac

SEQ ID NO: 2107 - DNA, 20 bp, artificial
  human GFAT antisense
gggaaaatgtaagaggtaac

SEQ ID NO: 2108 - DNA, 20 bp, artificial
  human GFAT antisense
ggtccagaaatgcaacaccc

SEQ ID NO: 2109 - DNA, 20 bp, artificial
  human GFAT antisense
atcttctcttaaaacttggc

SEQ ID NO: 2110 - DNA, 20 bp, artificial
  human GFAT antisense
atttaaaaacaaaacagaaa

SEQ ID NO: 2111 - DNA, 20 bp, artificial
  human GFAT antisense
gaaataaaaaacacttttag

SEQ ID NO: 2112 - DNA, 20 bp, artificial
  human GFAT antisense
aaataaaagactacagatac

SEQ ID NO: 2113 - DNA, 20 bp, artificial
  human GFAT antisense
ccaaatccatatcttgttgc

SEQ ID NO: 2114 - DNA, 20 bp, artificial
  human GFAT antisense
tggcaattgtctctgtgtct

SEQ ID NO: 2115 - DNA, 20 bp, artificial
  human GFAT antisense
ttggcaattgtctctgtgtc

SEQ ID NO: 2116 - DNA, 20 bp, artificial
  human GFAT antisense
cgattgtcatacatatactt

SEQ ID NO: 2117 - DNA, 20 bp, artificial
  human GFAT antisense
caactgcttgcccgggaaaa

SEQ ID NO: 2118 - DNA, 20 bp, artificial
  human GFAT antisense
gtcagctcctcaagaacttg

SEQ ID NO: 2119 - DNA, 20 bp, artificial
  human GFAT antisense
ggaccagcattaatatgaac

SEQ ID NO: 2120 - DNA, 20 bp, artificial
  human GFAT antisense
cacaccaatctcaggaccag

SEQ ID NO: 2121 - DNA, 20 bp, artificial
  human GFAT antisense
gcgtctttcttgcatggaga

SEQ ID NO: 2122 - DNA, 20 bp, artificial
  human GFAT antisense
ctttgcgtctttcttgcatg

SEQ ID NO: 2123 - DNA, 20 bp, artificial
  human GFAT antisense
gacaagtagcataatgatag

SEQ ID NO: 2124 - DNA, 20 bp, artificial
  human GFAT antisense
ggccatgtttcaattcacca

SEQ ID NO: 2125 - DNA, 20 bp, artificial
  human GFAT antisense
tcaatttatccaccaaagcc

SEQ ID NO: 2126 - DNA, 20 bp, artificial
  human GFAT antisense
gtacattttgtatagatatt

SEQ ID NO: 2127 - DNA, 20 bp, artificial
  human GFAT antisense
tacagtttcgtacattttgt

SEQ ID NO: 2128 - DNA, 20 bp, artificial
  human GFAT antisense
atacagtttcgtacattttg

SEQ ID NO: 2129 - DNA, 20 bp, artificial
  human GFAT antisense
tctttctgatacagattcca

SEQ ID NO: 2130 - DNA, 20 bp, artificial
  human GFAT antisense
attgaagtggagggtccaga

SEQ ID NO: 2131 - DNA, 20 bp, artificial
  human GFAT antisense
gaagtatggtgaaacaagta

SEQ ID NO: 2132 - DNA, 20 bp, artificial
  human GFAT antisense
caccaatcaacagagggcta

SEQ ID NO: 2133 - DNA, 20 bp, artificial
  human GFAT antisense
tgctgtccacacgagagaga

SEQ ID NO: 2134 - DNA, 20 bp, artificial
  human GFAT antisense
gttctatgacagcacttgca

SEQ ID NO: 2135 - DNA, 20 bp, artificial
  human GFAT antisense
gaacttgacgtgttgctaca

SEQ ID NO: 2136 - DNA, 20 bp, artificial
  human GFAT antisense
catcaaagtatctgctgtct

SEQ ID NO: 2137 - DNA, 20 bp, artificial
  human GFAT antisense
gggatcacgctgagaatgcc

SEQ ID NO: 2138 - DNA, 20 bp, artificial
  human GFAT antisense
ataactgatatataaataag

SEQ ID NO: 2139 - DNA, 20 bp, artificial
  human GFAT antisense
ctagaatctttctgatacag

SEQ ID NO: 2140 - DNA, 20 bp, artificial
  human GFAT antisense
gtgcaaatatgttaaggatt

SEQ ID NO: 2141 - DNA, 20 bp, artificial
  human GFAT antisense
caaatcccacaccagcagaa

SEQ ID NO: 2142 - DNA, 20 bp, artificial
  human GFAT antisense
tacatatacttaacgagctt

SEQ ID NO: 2143 - DNA, 20 bp, artificial
  human GFAT antisense
cagactctggctgctcaaat

SEQ ID NO: 2144 - DNA, 20 bp, artificial
  human GFAT antisense
catgatctctttgcgtcttt

SEQ ID NO: 2145 - DNA, 20 bp, artificial
  human GFAT antisense
gtcatccatgctcagtactt

SEQ ID NO: 2146 - DNA, 20 bp, artificial
  human GFAT antisense
gtttcaattcaccagcaagg

SEQ ID NO: 2147 - DNA, 20 bp, artificial
  human GFAT antisense
tatccaccaaagccagaggg

SEQ ID NO: 2148 - DNA, 20 bp, artificial
  human GFAT antisense
aaaatgtaagaggtaacttc

SEQ ID NO: 2149 - DNA, 20 bp, artificial
  human GFAT antisense
ctacagataatagacaacaa

SEQ ID NO: 2150 - DNA, 20 bp, artificial
  human GFAT antisense
caccaatgcactactgtaat

SEQ ID NO: 2151 - DNA, 20 bp, artificial
  human GFAT antisense
aaataaaaaacacttttagg

SEQ ID NO: 2152 - DNA, 20 bp, artificial
  human GFAT antisense
caaatccatatcttgttgct

SEQ ID NO: 2153 - DNA, 20 bp, artificial
  human GFAT antisense
acatatacttaacgagcttg

SEQ ID NO: 2154 - DNA, 20 bp, artificial
  human GFAT antisense
ttgcccgggaaaatgaacac

SEQ ID NO: 2155 - DNA, 20 bp, artificial
  human GFAT antisense
atcaacagagggctacctcg

SEQ ID NO: 2156 - DNA, 20 bp, artificial
  human GFAT antisense
tactgctgcaacatcatcat

SEQ ID NO: 2157 - DNA, 20 bp, artificial
  human GFAT antisense
aagctcctctctccttacag

SEQ ID NO: 2158 - DNA, 20 bp, artificial
  human GFAT antisense
gatccccacagttaaagctc

SEQ ID NO: 2159 - DNA, 20 bp, artificial
  human GFAT antisense
cgtctttcttgcatggagat

SEQ ID NO: 2160 - DNA, 20 bp, artificial
  human GFAT antisense
acaagtagcataatgatagc

SEQ ID NO: 2161 - DNA, 20 bp, artificial
  human GFAT antisense
aattcaccagcaaggatgcc

SEQ ID NO: 2162 - DNA, 20 bp, artificial
  human GFAT antisense
tgagtggggcaccttgatcg

SEQ ID NO: 2163 - DNA, 20 bp, artificial
  human GFAT antisense
acagtttcgtacattttgta

SEQ ID NO: 2164 - DNA, 20 bp, artificial
  human GFAT antisense
atgtaagaggtaacttcaca

SEQ ID NO: 2165 - DNA, 20 bp, artificial
  human GFAT antisense
tcaaatttaaaatcatattg

SEQ ID NO: 2166 - DNA, 20 bp, artificial
  human GFAT antisense
atacttaacgagcttggcaa

SEQ ID NO: 2167 - DNA, 20 bp, artificial
  human GFAT antisense
catatacttaacgagcttgg

SEQ ID NO: 2168 - DNA, 20 bp, artificial
  human GFAT antisense
aaatgaacacttttaaacac

SEQ ID NO: 2169 - DNA, 20 bp, artificial
  human GFAT antisense
tttatgttcactccgtacac

SEQ ID NO: 2170 - DNA, 20 bp, artificial
  human GFAT antisense
tatgtgatccttcaaaccac

SEQ ID NO: 2171 - DNA, 20 bp, artificial
  human GFAT antisense
cctgcaagcagtccactgag

SEQ ID NO: 2172 - DNA, 20 bp, artificial
  human GFAT antisense
atagcctctcagcacagcaa

SEQ ID NO: 2173 - DNA, 20 bp, artificial
  human GFAT antisense
gtaagaggtaacttcacaaa

SEQ ID NO: 2174 - DNA, 20 bp, artificial
  human GFAT antisense
agaaacatattgtcttctca

SEQ ID NO: 2175 - DNA, 20 bp, artificial
  human GFAT antisense
caagtatgagcatacactgc

SEQ ID NO: 2176 - DNA, 20 bp, artificial
  human GFAT antisense
catgatgccggagacacggc

SEQ ID NO: 2177 - DNA, 20 bp, artificial
  human GFAT antisense
acttgcatcagaagcaaagt

SEQ ID NO: 2178 - DNA, 20 bp, artificial
  human GFAT antisense
taagaatcaaacgccggcat

SEQ ID NO: 2179 - DNA, 20 bp, artificial
  human GFAT antisense
aaagactggtgtgtttctgt

SEQ ID NO: 2180 - DNA, 20 bp, artificial
  human GFAT antisense
cccacagttaaagctcctct

SEQ ID NO: 2181 - DNA, 20 bp, artificial
  human GFAT antisense
gggcaccttgatcgttcttt

SEQ ID NO: 2182 - DNA, 20 bp, artificial
  human GFAT antisense
acatcatagcctctcagcac

SEQ ID NO: 2183 - DNA, 20 bp, artificial
  human GFAT antisense
taagaggtaacttcacaaaa

SEQ ID NO: 2184 - DNA, 20 bp, artificial
  human GFAT antisense
atgcaacacccagcattctt

SEQ ID NO: 2185 - DNA, 20 bp, artificial
  human GFAT antisense
cccacaccagcagaatcata

SEQ ID NO: 2186 - DNA, 20 bp, artificial
  human GFAT antisense
ccatcaaatcccacaccagc

SEQ ID NO: 2187 - DNA, 20 bp, artificial
  human GFAT antisense
aaggtagtaaagctggtatc

SEQ ID NO: 2188 - DNA, 20 bp, artificial
  human GFAT antisense
aacacaagtgcaaaagcacc

SEQ ID NO: 2189 - DNA, 20 bp, artificial
  human GFAT antisense
ccgggaaaatgaacactttt

SEQ ID NO: 2190 - DNA, 20 bp, artificial
  human GFAT antisense
ccgtacaccaatcaacagag

SEQ ID NO: 2191 - DNA, 20 bp, artificial
  human GFAT antisense
tataggaatgtgatcagtag

SEQ ID NO: 2192 - DNA, 20 bp, artificial
  human GFAT antisense
tggtgtgttctatgacagca

SEQ ID NO: 2193 - DNA, 20 bp, artificial
  human GFAT antisense
gactctggctgctcaaatat

SEQ ID NO: 2194 - DNA, 20 bp, artificial
  human GFAT antisense
aataagaatcaaacgccggc

SEQ ID NO: 2195 - DNA, 20 bp, artificial
  human GFAT antisense
aagaacttgacgtgttgcta

SEQ ID NO: 2196 - DNA, 20 bp, artificial
  human GFAT antisense
ccacaatctgtctcccgtga

SEQ ID NO: 2197 - DNA, 20 bp, artificial
  human GFAT antisense
gagcattctgacacttggca

SEQ ID NO: 2198 - DNA, 20 bp, artificial
  human GFAT antisense
gaataattataactgatata

SEQ ID NO: 2199 - DNA, 20 bp, artificial
  human GFAT antisense
aatatagattccattattca

SEQ ID NO: 2200 - DNA, 20 bp, artificial
  human GFAT antisense
agatactccaattaaatgca

SEQ ID NO: 2201 - DNA, 20 bp, artificial
  human GFAT antisense
tggcaaacccttccctaact

SEQ ID NO: 2202 - DNA, 20 bp, artificial
  human GFAT antisense
aaaacttggcaaacccttcc

SEQ ID NO: 2203 - DNA, 20 bp, artificial
  human GFAT antisense
tcaaaataaatcacatcttc

SEQ ID NO: 2204 - DNA, 20 bp, artificial
  human GFAT antisense
aatatgttaaggattgagac

SEQ ID NO: 2205 - DNA, 20 bp, artificial
  human GFAT antisense
tataaaattgtgcaaatatg

SEQ ID NO: 2206 - DNA, 20 bp, artificial
  human GFAT antisense
gattgtcatacatatactta

SEQ ID NO: 2207 - DNA, 20 bp, artificial
  human GFAT antisense
gcccgggaaaatgaacactt

SEQ ID NO: 2208 - DNA, 20 bp, artificial
  human GFAT antisense
gcagttcgtttaattcgatg

SEQ ID NO: 2209 - DNA, 20 bp, artificial
  human GFAT antisense
atcaaacgccggcatctctg

SEQ ID NO: 2210 - DNA, 20 bp, artificial
  human GFAT antisense
aagcaataagaatcaaacgc

SEQ ID NO: 2211 - DNA, 20 bp, artificial
  human GFAT antisense
atctgctgtctcacctgatt

SEQ ID NO: 2212 - DNA, 20 bp, artificial
  human GFAT antisense
acccatcaaagtatctgctg

SEQ ID NO: 2213 - DNA, 20 bp, artificial
  human GFAT antisense
ttgcgtctttcttgcatgga

SEQ ID NO: 2214 - DNA, 20 bp, artificial
  human GFAT antisense
ccgagcaaccacttgctgaa

SEQ ID NO: 2215 - DNA, 20 bp, artificial
  human GFAT antisense
cctgccgagcaaccacttgc

SEQ ID NO: 2216 - DNA, 20 bp, artificial
  human GFAT antisense
gcccctgccgagcaaccact

SEQ ID NO: 2217 - DNA, 20 bp, artificial
  human GFAT antisense
ggccgcccctgccgagcaac

SEQ ID NO: 2218 - DNA, 20 bp, artificial
  human GFAT antisense
agggatcacgctgagaatgc

SEQ ID NO: 2219 - DNA, 20 bp, artificial
  human GFAT antisense
caacatcatagcctctcagc

SEQ ID NO: 2220 - DNA, 20 bp, artificial
  human GFAT antisense
ggcaagattccgtgggaaat

SEQ ID NO: 2221 - DNA, 20 bp, artificial
  human GFAT antisense
tggagggtccagaaatgcaa

SEQ ID NO: 2222 - DNA, 20 bp, artificial
  human GFAT antisense
tactccaattaaatgcacta

SEQ ID NO: 2223 - DNA, 20 bp, artificial
  human GFAT antisense
tcctaaatttcttccaccta

SEQ ID NO: 2224 - DNA, 20 bp, artificial
  human GFAT antisense
cctttgctttccaaaaactt

SEQ ID NO: 2225 - DNA, 20 bp, artificial
  human GFAT antisense
tacaccaatcaacagagggc

SEQ ID NO: 2226 - DNA, 20 bp, artificial
  human GFAT antisense
tccgtacaccaatcaacaga

SEQ ID NO: 2227 - DNA, 20 bp, artificial
  human GFAT antisense
tatgttcactccgtacacca

SEQ ID NO: 2228 - DNA, 20 bp, artificial
  human GFAT antisense
atcagtagaaagtttatgtt

SEQ ID NO: 2229 - DNA, 20 bp, artificial
  human GFAT antisense
agaacttgacgtgttgctac

SEQ ID NO: 2230 - DNA, 20 bp, artificial
  human GFAT antisense
tgcactactgtaatatttcg

SEQ ID NO: 2231 - DNA, 20 bp, artificial
  human GFAT antisense
aaaataaaagactacagata

SEQ ID NO: 2232 - DNA, 20 bp, artificial
  human GFAT antisense
aaatccatatcttgttgctt

SEQ ID NO: 2233 - DNA, 20 bp, artificial
  human GFAT antisense
ggtgtacatcaaattctata

SEQ ID NO: 2234 - DNA, 20 bp, artificial
  human GFAT antisense
aatcaacagagggctacctc

SEQ ID NO: 2235 - DNA, 20 bp, artificial
  human GFAT antisense
acagactctggctgctcaaa

SEQ ID NO: 2236 - DNA, 20 bp, artificial
  human GFAT antisense
tttatgtgatccttcaaacc

SEQ ID NO: 2237 - DNA, 20 bp, artificial
  human GFAT antisense
aacttgacgtgttgctacac

SEQ ID NO: 2238 - DNA, 20 bp, artificial
  human GFAT antisense
aaagtatctgctgtctcacc

SEQ ID NO: 2239 - DNA, 20 bp, artificial
  human GFAT antisense
gcctcgtcccattatcagaa

SEQ ID NO: 2240 - DNA, 20 bp, artificial
  human GFAT antisense
agacaagtagcataatgata

SEQ ID NO: 2241 - DNA, 20 bp, artificial
  human GFAT antisense
aagggatcacgctgagaatg

SEQ ID NO: 2242 - DNA, 20 bp, artificial
  human GFAT antisense
gcacagcaaggtggaaagcc

SEQ ID NO: 2243 - DNA, 20 bp, artificial
  human GFAT antisense
atatataaataaggatttac

SEQ ID NO: 2244 - DNA, 20 bp, artificial
  human GFAT antisense
cacatcttctcttaaaactt

SEQ ID NO: 2245 - DNA, 20 bp, artificial
  human GFAT antisense
ttccacctacagataataga

SEQ ID NO: 2246 - DNA, 20 bp, artificial
  human GFAT antisense
gtactccagtctctgaaggc

SEQ ID NO: 2247 - DNA, 20 bp, artificial
  human GFAT antisense
cacaccagcagaatcatatc

SEQ ID NO: 2248 - DNA, 20 bp, artificial
  human GFAT antisense
atatacttaacgagcttggc

SEQ ID NO: 2249 - DNA, 20 bp, artificial
  human GFAT antisense
attgtcatacatatacttaa

SEQ ID NO: 2250 - DNA, 20 bp, artificial
  human GFAT antisense
gaaagatgacgcgattggtg

SEQ ID NO: 2251 - DNA, 20 bp, artificial
  human GFAT antisense
gcaacatcatcatcttccag

SEQ ID NO: 2252 - DNA, 20 bp, artificial
  human GFAT antisense
tctccttacagtaacgaaga

SEQ ID NO: 2253 - DNA, 20 bp, artificial
  human GFAT antisense
attataactgatatataaat

SEQ ID NO: 2254 - DNA, 20 bp, artificial
  human GFAT antisense
gtggaataattataactgat

SEQ ID NO: 2255 - DNA, 20 bp, artificial
  human GFAT antisense
tgtaagaggtaacttcacaa

SEQ ID NO: 2256 - DNA, 20 bp, artificial
  human GFAT antisense
caatatagattccattattc

SEQ ID NO: 2257 - DNA, 20 bp, artificial
  human GFAT antisense
atgcactactgtaatatttc

SEQ ID NO: 2258 - DNA, 20 bp, artificial
  human GFAT antisense
ctataaaattgtgcaaatat

SEQ ID NO: 2259 - DNA, 20 bp, artificial
  human GFAT antisense
ggatcgggggtgcacacacg

SEQ ID NO: 2260 - DNA, 20 bp, artificial
  human GFAT antisense
tcccacaccagcagaatcat

SEQ ID NO: 2261 - DNA, 20 bp, artificial
  human GFAT antisense
gtttatgttcactccgtaca

SEQ ID NO: 2262 - DNA, 20 bp, artificial
  human GFAT antisense
ataggaatgtgatcagtaga

SEQ ID NO: 2263 - DNA, 20 bp, artificial
  human GFAT antisense
aaaggcaggttgtgctgtcc

SEQ ID NO: 2264 - DNA, 20 bp, artificial
  human GFAT antisense
tctcgaaagactggtgtgtt

SEQ ID NO: 2265 - DNA, 20 bp, artificial
  human GFAT antisense
actggctggtataagccttt

SEQ ID NO: 2266 - DNA, 20 bp, artificial
  human GFAT antisense
taagggcaaacatcacaagg

SEQ ID NO: 2267 - DNA, 20 bp, artificial
  human GFAT antisense
aatcaaatcaggcagccgtt

SEQ ID NO: 2268 - DNA, 20 bp, artificial
  human GFAT antisense
atatagattccattattcaa

SEQ ID NO: 2269 - DNA, 20 bp, artificial
  human GFAT antisense
ttaaaaacaaaacagaaaca

SEQ ID NO: 2270 - DNA, 20 bp, artificial
  human GFAT antisense
ttcaaatttaaaatcatatt

SEQ ID NO: 2271 - DNA, 20 bp, artificial
  human GFAT antisense
taccacacatgatgccggag

SEQ ID NO: 2272 - DNA, 20 bp, artificial
  human GFAT antisense
ctttatgtgatccttcaaac

SEQ ID NO: 2273 - DNA, 20 bp, artificial
  human GFAT antisense
aacgccggcatctctggatc

SEQ ID NO: 2274 - DNA, 20 bp, artificial
  human GFAT antisense
aactcagtcagctcctcaag

SEQ ID NO: 2275 - DNA, 20 bp, artificial
  human GFAT antisense
caatctcaggaccagcatta

SEQ ID NO: 2276 - DNA, 20 bp, artificial
  human GFAT antisense
ggcaaacatcacaagggata

SEQ ID NO: 2277 - DNA, 20 bp, artificial
  human GFAT antisense
ttgtatagatattcctcact

SEQ ID NO: 2278 - DNA, 20 bp, artificial
  human GFAT antisense
aacttggcaaacccttccct

SEQ ID NO: 2279 - DNA, 20 bp, artificial
  human GFAT antisense
accaatgcactactgtaata

SEQ ID NO: 2280 - DNA, 20 bp, artificial
  human GFAT antisense
aaaaataaaagactacagat

SEQ ID NO: 2281 - DNA, 20 bp, artificial
  human GFAT antisense
gttgtgattttaaagaacaa

SEQ ID NO: 2282 - DNA, 20 bp, artificial
  human GFAT antisense
gatcgggggtgcacacacga

SEQ ID NO: 2283 - DNA, 20 bp, artificial
  human GFAT antisense
gctggcgggatcgggggtgc

SEQ ID NO: 2284 - DNA, 20 bp, artificial
  human GFAT antisense
accacacatgatgccggaga

SEQ ID NO: 2285 - DNA, 20 bp, artificial
  human GFAT antisense
tttgcaggcattggcttccc

SEQ ID NO: 2286 - DNA, 20 bp, artificial
  human GFAT antisense
agtataggaatgtgatcagt

SEQ ID NO: 2287 - DNA, 20 bp, artificial
  human GFAT antisense
tgcagttcgtttaattcgat

SEQ ID NO: 2288 - DNA, 20 bp, artificial
  human GFAT antisense
agtgtttgcacagctcgtcc

SEQ ID NO: 2289 - DNA, 20 bp, artificial
  human GFAT antisense
atctctttgcgtctttcttg

SEQ ID NO: 2290 - DNA, 20 bp, artificial
  human GFAT antisense
tttcgtcatccatgctcagt

SEQ ID NO: 2291 - DNA, 20 bp, artificial
  human GFAT antisense
ctcatgatgatcatgatcac

SEQ ID NO: 2292 - DNA, 20 bp, artificial
  human GFAT antisense
gaagagcattctgacacttg

SEQ ID NO: 2293 - DNA, 20 bp, artificial
  human GFAT antisense
ttgatttaaaaacaaaacag

SEQ ID NO: 2294 - DNA, 20 bp, artificial
  human GFAT antisense
cagataatagacaacaagtc

SEQ ID NO: 2295 - DNA, 20 bp, artificial
  human GFAT antisense
agacccaccaatgcactact

SEQ ID NO: 2296 - DNA, 20 bp, artificial
  human GFAT antisense
atacatatacttaacgagct

SEQ ID NO: 2297 - DNA, 20 bp, artificial
  human GFAT antisense
agactctggctgctcaaata

SEQ ID NO: 2298 - DNA, 20 bp, artificial
  human GFAT antisense
aatttcgtcatccatgctca

SEQ ID NO: 2299 - DNA, 20 bp, artificial
  human GFAT antisense
tctgaatttcgtcatccatg

SEQ ID NO: 2300 - DNA, 20 bp, artificial
  human GFAT antisense
gctgaagagcattctgacac

SEQ ID NO: 2301 - DNA, 20 bp, artificial
  human GFAT antisense
cacaggccgcccctgccgag

SEQ ID NO: 2302 - DNA, 20 bp, artificial
  human GFAT antisense
aaggtggaaagccagcaact

SEQ ID NO: 2303 - DNA, 20 bp, artificial
  human GFAT antisense
atcatagcctctcagcacag

SEQ ID NO: 2304 - DNA, 20 bp, artificial
  human GFAT antisense
gaatctttctgatacagatt

SEQ ID NO: 2305 - DNA, 20 bp, artificial
  human GFAT antisense
taaaatttttcagttttaag

SEQ ID NO: 2306 - DNA, 20 bp, artificial
  human GFAT antisense
ttcacgacagactctggctg

SEQ ID NO: 2307 - DNA, 20 bp, artificial
  human GFAT antisense
tgacgtgttgctacaccagc

SEQ ID NO: 2308 - DNA, 20 bp, artificial
  human GFAT antisense
tttgcgtctttcttgcatgg

SEQ ID NO: 2309 - DNA, 20 bp, artificial
  human GFAT antisense
caacaagtctgagaaactaa

SEQ ID NO: 2310 - DNA, 20 bp, artificial
  human GFAT antisense
tgttgtgattttaaagaaca

SEQ ID NO: 2311 - DNA, 20 bp, artificial
  human GFAT antisense
atcgggggtgcacacacgag

SEQ ID NO: 2312 - DNA, 20 bp, artificial
  human GFAT antisense
cctttcttcttaataagctg

SEQ ID NO: 2313 - DNA, 20 bp, artificial
  human GFAT antisense
aaggcaggttgtgctgtcca

SEQ ID NO: 2314 - DNA, 20 bp, artificial
  human GFAT antisense
caataagaatcaaacgccgg

SEQ ID NO: 2315 - DNA, 20 bp, artificial
  human GFAT antisense
gcaataagaatcaaacgccg

SEQ ID NO: 2316 - DNA, 20 bp, artificial
  human GFAT antisense
ggaactgccaactgtgtttg

SEQ ID NO: 2317 - DNA, 20 bp, artificial
  human GFAT antisense
aacatcatagcctctcagca

SEQ ID NO: 2318 - DNA, 20 bp, artificial
  human GFAT antisense
acagtcacagatttggcaag

SEQ ID NO: 2319 - DNA, 20 bp, artificial
  human GFAT antisense
tatagattccattattcaaa

SEQ ID NO: 2320 - DNA, 20 bp, artificial
  human GFAT antisense
agaatctttctgatacagat

SEQ ID NO: 2321 - DNA, 20 bp, artificial
  human GFAT antisense
ttgaagtggagggtccagaa

SEQ ID NO: 2322 - DNA, 20 bp, artificial
  human GFAT antisense
tcttctcagattgaagtgga

SEQ ID NO: 2323 - DNA, 20 bp, artificial
  human GFAT antisense
aaacaagtaccaatttttag

SEQ ID NO: 2324 - DNA, 20 bp, artificial
  human GFAT antisense
tctcttaaaacttggcaaac

SEQ ID NO: 2325 - DNA, 20 bp, artificial
  human GFAT antisense
atttttcagttttaagtttt

SEQ ID NO: 2326 - DNA, 20 bp, artificial
  human GFAT antisense
aataaaatttttcagtttta

SEQ ID NO: 2327 - DNA, 20 bp, artificial
  human GFAT antisense
aaaattgtgcaaatatgtta

SEQ ID NO: 2328 - DNA, 20 bp, artificial
  human GFAT antisense
caacatgtacacatcccatc

SEQ ID NO: 2329 - DNA, 20 bp, artificial
  human GFAT antisense
ctgcttgcccgggaaaatga

SEQ ID NO: 2330 - DNA, 20 bp, artificial
  human GFAT antisense
tatgacagcacttgcatcag

SEQ ID NO: 2331 - DNA, 20 bp, artificial
  human GFAT antisense
tccttcaaaccacccaaatt

SEQ ID NO: 2332 - DNA, 20 bp, artificial
  human GFAT antisense
tgatgataaagttctgttgc

SEQ ID NO: 2333 - DNA, 20 bp, artificial
  human GFAT antisense
tggaaagccagcaactgtaa

SEQ ID NO: 2334 - DNA, 20 bp, artificial
  human GFAT antisense
acattttgtatagatattcc

SEQ ID NO: 2335 - DNA, 20 bp, artificial
  human GFAT antisense
aatgtaagaggtaacttcac

SEQ ID NO: 2336 - DNA, 20 bp, artificial
  human GFAT antisense
caacacccagcattctttaa

SEQ ID NO: 2337 - DNA, 20 bp, artificial
  human GFAT antisense
acaaatttcaaaataaatca

SEQ ID NO: 2338 - DNA, 20 bp, artificial
  human GFAT antisense
ataaaatttttcagttttaa

SEQ ID NO: 2339 - DNA, 20 bp, artificial
  human GFAT antisense
aactgcttgcccgggaaaat

SEQ ID NO: 2340 - DNA, 20 bp, artificial
  human GFAT antisense
caagcaataagaatcaaacg

SEQ ID NO: 2341 - DNA, 20 bp, artificial
  human GFAT antisense
aaagctcctctctccttaca

SEQ ID NO: 2342 - DNA, 20 bp, artificial
  human GFAT antisense
gaaacaagtaccaattttta

SEQ ID NO: 2343 - DNA, 20 bp, artificial
  human GFAT antisense
gatactccaattaaatgcac

SEQ ID NO: 2344 - DNA, 20 bp, artificial
  human GFAT antisense
atccaaatccatatcttgtt

SEQ ID NO: 2345 - DNA, 20 bp, artificial
  human GFAT antisense
gtagaaagtttatgttcact

SEQ ID NO: 2346 - DNA, 20 bp, artificial
  human GFAT antisense
taggaatgtgatcagtagaa

SEQ ID NO: 2347 - DNA, 20 bp, artificial
  human GFAT antisense
caagaacttgacgtgttgct

SEQ ID NO: 2348 - DNA, 20 bp, artificial
  human GFAT antisense
gaactgccaactgtgtttgt

SEQ ID NO: 2349 - DNA, 20 bp, artificial
  human GFAT antisense
gttctgttgctagtttctga

SEQ ID NO: 2350 - DNA, 20 bp, artificial
  human GFAT antisense
cccctgccgagcaaccactt

SEQ ID NO: 2351 - DNA, 20 bp, artificial
  human GFAT antisense
acttggcaaacccttcccta

SEQ ID NO: 2352 - DNA, 20 bp, artificial
  human GFAT antisense
ttcaaaataaatcacatctt

SEQ ID NO: 2353 - DNA, 20 bp, artificial
  human GFAT antisense
aaaagactacagatacaagg

SEQ ID NO: 2354 - DNA, 20 bp, artificial
  human GFAT antisense
aaaaaataaaagactacaga

SEQ ID NO: 2355 - DNA, 20 bp, artificial
  human GFAT antisense
agcagtcatttaaaaaataa

SEQ ID NO: 2356 - DNA, 20 bp, artificial
  human GFAT antisense
ttgtgattttaaagaacaag

SEQ ID NO: 2357 - DNA, 20 bp, artificial
  human GFAT antisense
tctgtgttgtgattttaaag

SEQ ID NO: 2358 - DNA, 20 bp, artificial
  human GFAT antisense
ctccgtacaccaatcaacag

SEQ ID NO: 2359 - DNA, 20 bp, artificial
  human GFAT antisense
aaagatgacgcgattggtgt

SEQ ID NO: 2360 - DNA, 20 bp, artificial
  human GFAT antisense
gctgcaacatcatcatcttc

SEQ ID NO: 2361 - DNA, 20 bp, artificial
  human GFAT antisense
tcgatggatagaaagacgtc

SEQ ID NO: 2362 - DNA, 20 bp, artificial
  human GFAT antisense
ttgcacagctcgtccggggt

SEQ ID NO: 2363 - DNA, 20 bp, artificial
  human GFAT antisense
tgatccttcaaaccacccaa

SEQ ID NO: 2364 - DNA, 20 bp, artificial
  human GFAT antisense
tgcaagcagtccactgagtg

SEQ ID NO: 2365 - DNA, 20 bp, artificial
  human GFAT antisense
tagaatctttctgatacaga

SEQ ID NO: 2366 - DNA, 20 bp, artificial
  human GFAT antisense
taaaacttggcaaacccttc

SEQ ID NO: 2367 - DNA, 20 bp, artificial
  human GFAT antisense
aatttttcagttttaagttt

SEQ ID NO: 2368 - DNA, 20 bp, artificial
  human GFAT antisense
agataatagacaacaagtct

SEQ ID NO: 2369 - DNA, 20 bp, artificial
  human GFAT antisense
atgtcattcagcagtcattt

SEQ ID NO: 2370 - DNA, 20 bp, artificial
  human GFAT antisense
tcgggggtgcacacacgagc

SEQ ID NO: 2371 - DNA, 20 bp, artificial
  human GFAT antisense
atgttcactccgtacaccaa

SEQ ID NO: 2372 - DNA, 20 bp, artificial
  human GFAT antisense
gacccatcaaagtatctgct

SEQ ID NO: 2373 - DNA, 20 bp, artificial
  human GFAT antisense
tggaactgccaactgtgttt

SEQ ID NO: 2374 - DNA, 20 bp, artificial
  human GFAT antisense
gtctttcttgcatggagatc

SEQ ID NO: 2375 - DNA, 20 bp, artificial
  human GFAT antisense
ggatcacgctgagaatgccc

SEQ ID NO: 2376 - DNA, 20 bp, artificial
  human GFAT antisense
atagattccattattcaaag

SEQ ID NO: 2377 - DNA, 20 bp, artificial
  human GFAT antisense
gtccagaaatgcaacaccca

SEQ ID NO: 2378 - DNA, 20 bp, artificial
  human GFAT antisense
tgaaacaagtaccaattttt

SEQ ID NO: 2379 - DNA, 20 bp, artificial
  human GFAT antisense
aacaagtctgagaaactaag

SEQ ID NO: 2380 - DNA, 20 bp, artificial
  human GFAT antisense
gctataaaattgtgcaaata

SEQ ID NO: 2381 - DNA, 20 bp, artificial
  human GFAT antisense
tactccagtctctgaaggcc

SEQ ID NO: 2382 - DNA, 20 bp, artificial
  human GFAT antisense
atgacagcacttgcatcaga

SEQ ID NO: 2383 - DNA, 20 bp, artificial
  human GFAT antisense
aagatgacgcgattggtgtg

SEQ ID NO: 2384 - DNA, 20 bp, artificial
  human GFAT antisense
tcaaacgccggcatctctgg

SEQ ID NO: 2385 - DNA, 20 bp, artificial
  human GFAT antisense
caagcatgatctctttgcgt

SEQ ID NO: 2386 - DNA, 20 bp, artificial
  human GFAT antisense
gccatgtttcaattcaccag

SEQ ID NO: 2387 - DNA, 20 bp, artificial
  human GFAT antisense
tccactgagtggggcacctt

SEQ ID NO: 2388 - DNA, 20 bp, artificial
  human GFAT antisense
atcacgctgagaatgccctg

SEQ ID NO: 2389 - DNA, 20 bp, artificial
  human GFAT antisense
caagattccgtgggaaatca

SEQ ID NO: 2390 - DNA, 20 bp, artificial
  human GFAT antisense
gaggtaacttcacaaaaatc

SEQ ID NO: 2391 - DNA, 20 bp, artificial
  human GFAT antisense
taaagaaaataatagctaga

SEQ ID NO: 2392 - DNA, 20 bp, artificial
  human GFAT antisense
tacagataatagacaacaag

SEQ ID NO: 2393 - DNA, 20 bp, artificial
  human GFAT antisense
tccacctacagataatagac

SEQ ID NO: 2394 - DNA, 20 bp, artificial
  human GFAT antisense
caatgcactactgtaatatt

SEQ ID NO: 2395 - DNA, 20 bp, artificial
  human GFAT antisense
ataccacacatgatgccgga

SEQ ID NO: 2396 - DNA, 20 bp, artificial
  human GFAT antisense
catcaaatcccacaccagca

SEQ ID NO: 2397 - DNA, 20 bp, artificial
  human GFAT antisense
ttcttaataagctgggtttt

SEQ ID NO: 2398 - DNA, 20 bp, artificial
  human GFAT antisense
gcctttgctttccaaaaact

SEQ ID NO: 2399 - DNA, 20 bp, artificial
  human GFAT antisense
gtgttctatgacagcacttg

SEQ ID NO: 2400 - DNA, 20 bp, artificial
  human GFAT antisense
acaccagcatggtaacttgt

SEQ ID NO: 2401 - DNA, 20 bp, artificial
  human GFAT antisense
gcatgatctctttgcgtctt

SEQ ID NO: 2402 - DNA, 20 bp, artificial
  human GFAT antisense
agccagagggccatgtttca

SEQ ID NO: 2403 - DNA, 20 bp, artificial
  human GFAT antisense
aacacccagcattctttaaa

SEQ ID NO: 2404 - DNA, 20 bp, artificial
  human GFAT antisense
gaaacaaatttcaaaataaa

SEQ ID NO: 2405 - DNA, 20 bp, artificial
  human GFAT antisense
caagtctgagaaactaaggc

SEQ ID NO: 2406 - DNA, 20 bp, artificial
  human GFAT antisense
acagataatagacaacaagt

SEQ ID NO: 2407 - DNA, 20 bp, artificial
  human GFAT antisense
cacacacgagcttcggtggg

SEQ ID NO: 2408 - DNA, 20 bp, artificial
  human GFAT antisense
gggcgagtggctggcgggat

SEQ ID NO: 2409 - DNA, 20 bp, artificial
  human GFAT antisense
atcccacaccagcagaatca

SEQ ID NO: 2410 - DNA, 20 bp, artificial
  human GFAT antisense
tgcaacatcatcatcttcca

SEQ ID NO: 2411 - DNA, 20 bp, artificial
  human GFAT antisense
aagggcaaacatcacaaggg

SEQ ID NO: 2412 - DNA, 20 bp, artificial
  human GFAT antisense
taatcaaatcaggcagccgt

SEQ ID NO: 2413 - DNA, 20 bp, artificial
  human GFAT antisense
agaaaataatagctagaatc

SEQ ID NO: 2414 - DNA, 20 bp, artificial
  human GFAT antisense
gtcttctcagattgaagtgg

SEQ ID NO: 2415 - DNA, 20 bp, artificial
  human GFAT antisense
tccaaatccatatcttgttg

SEQ ID NO: 2416 - DNA, 20 bp, artificial
  human GFAT antisense
aaaaactttttcaagtcttt

SEQ ID NO: 2417 - DNA, 20 bp, artificial
  human GFAT antisense
cacgacagactctggctgct

SEQ ID NO: 2418 - DNA, 20 bp, artificial
  human GFAT antisense
ctcctcaagaacttgacgtg

SEQ ID NO: 2419 - DNA, 20 bp, artificial
  human GFAT antisense
aactggctggtataagcctt

SEQ ID NO: 2420 - DNA, 20 bp, artificial
  human GFAT antisense
tacaaactggctggtataag

SEQ ID NO: 2421 - DNA, 20 bp, artificial
  human GFAT antisense
ggtggaaagccagcaactgt

SEQ ID NO: 2422 - DNA, 20 bp, artificial
  human GFAT antisense
gcctctcagcacagcaaggt

SEQ ID NO: 2423 - DNA, 20 bp, artificial
  human GFAT antisense
ctttctgatacagattccaa

SEQ ID NO: 2424 - DNA, 20 bp, artificial
  human GFAT antisense
ttaaggattgagacccacca

SEQ ID NO: 2425 - DNA, 20 bp, artificial
  human GFAT antisense
cttcaaatttaaaatcatat

SEQ ID NO: 2426 - DNA, 20 bp, artificial
  human GFAT antisense
aacatgtacacatcccatct

SEQ ID NO: 2427 - DNA, 20 bp, artificial
  human GFAT antisense
tatgtcattcagcagtcatt

SEQ ID NO: 2428 - DNA, 20 bp, artificial
  human GFAT antisense
aaatcccacaccagcagaat

SEQ ID NO: 2429 - DNA, 20 bp, artificial
  human GFAT antisense
tatacttaacgagcttggca

SEQ ID NO: 2430 - DNA, 20 bp, artificial
  human GFAT antisense
tagaaagtttatgttcactc

SEQ ID NO: 2431 - DNA, 20 bp, artificial
  human GFAT antisense
tcatcttccagaaagatgac

SEQ ID NO: 2432 - DNA, 20 bp, artificial
  human GFAT antisense
tacattttgtatagatattc

SEQ ID NO: 2433 - DNA, 20 bp, artificial
  human GFAT antisense
aattataactgatatataaa

SEQ ID NO: 2434 - DNA, 20 bp, artificial
  human GFAT antisense
aggtaacttcacaaaaatca

SEQ ID NO: 2435 - DNA, 20 bp, artificial
  human GFAT antisense
aatctttctgatacagattc

SEQ ID NO: 2436 - DNA, 20 bp, artificial
  human GFAT antisense
aaagaaaataatagctagaa

SEQ ID NO: 2437 - DNA, 20 bp, artificial
  human GFAT antisense
tttaaagaaaataatagcta

SEQ ID NO: 2438 - DNA, 20 bp, artificial
  human GFAT antisense
aacaaatttcaaaataaatc

SEQ ID NO: 2439 - DNA, 20 bp, artificial
  human GFAT antisense
acatcccatcttcaaattta

SEQ ID NO: 2440 - DNA, 20 bp, artificial
  human GFAT antisense
ctctgtgttgtgattttaaa

SEQ ID NO: 2441 - DNA, 20 bp, artificial
  human GFAT antisense
ggggcgagtggctggcggga

SEQ ID NO: 2442 - DNA, 20 bp, artificial
  human GFAT antisense
ttgcctgttctgtagagtat

SEQ ID NO: 2443 - DNA, 20 bp, artificial
  human GFAT antisense
tccatccactactgctgcaa

SEQ ID NO: 2444 - DNA, 20 bp, artificial
  human GFAT antisense
ttcgatggatagaaagacgt

SEQ ID NO: 2445 - DNA, 20 bp, artificial
  human GFAT antisense
acaagcaataagaatcaaac

SEQ ID NO: 2446 - DNA, 20 bp, artificial
  human GFAT antisense
cacaagcaataagaatcaaa

SEQ ID NO: 2447 - DNA, 20 bp, artificial
  human GFAT antisense
tcacgctgagaatgccctgc

SEQ ID NO: 2448 - DNA, 20 bp, artificial
  human GFAT antisense
gatatataaataaggattta

SEQ ID NO: 2449 - DNA, 20 bp, artificial
  human GFAT antisense
ttaaagaaaataatagctag

SEQ ID NO: 2450 - DNA, 20 bp, artificial
  human GFAT antisense
caaatttcaaaataaatcac

SEQ ID NO: 2451 - DNA, 20 bp, artificial
  human GFAT antisense
tgatttaaaaacaaaacaga

SEQ ID NO: 2452 - DNA, 20 bp, artificial
  human GFAT antisense
acaagtctgagaaactaagg

SEQ ID NO: 2453 - DNA, 20 bp, artificial
  human GFAT antisense
cgcttcctaaatttcttcca

SEQ ID NO: 2454 - DNA, 20 bp, artificial
  human GFAT antisense
ccacacatgatgccggagac

SEQ ID NO: 2455 - DNA, 20 bp, artificial
  human GFAT antisense
cagttcgtttaattcgatgg

SEQ ID NO: 2456 - DNA, 20 bp, artificial
  human GFAT antisense
ccttacagtaacgaagaccc

SEQ ID NO: 2457 - DNA, 20 bp, artificial
  human GFAT antisense
atttcgtcatccatgctcag

SEQ ID NO: 2458 - DNA, 20 bp, artificial
  human GFAT antisense
caaggtggaaagccagcaac

SEQ ID NO: 2459 - DNA, 20 bp, artificial
  human GFAT antisense
taactgatatataaataagg

SEQ ID NO: 2460 - DNA, 20 bp, artificial
  human GFAT antisense
ccaataaaatttttcagttt

SEQ ID NO: 2461 - DNA, 20 bp, artificial
  human GFAT antisense
acaacaagtctgagaaacta

SEQ ID NO: 2462 - DNA, 20 bp, artificial
  human GFAT antisense
ccacctacagataatagaca

SEQ ID NO: 2463 - DNA, 20 bp, artificial
  human GFAT antisense
atatgtcattcagcagtcat

SEQ ID NO: 2464 - DNA, 20 bp, artificial
  human GFAT antisense
ttgcaggcattggcttccca

SEQ ID NO: 2465 - DNA, 20 bp, artificial
  human GFAT antisense
cttaataagctgggttttgc

SEQ ID NO: 2466 - DNA, 20 bp, artificial
  human GFAT antisense
gaatttcgtcatccatgctc

SEQ ID NO: 2467 - DNA, 20 bp, artificial
  human GFAT antisense
taaaaacaaaacagaaacaa

SEQ ID NO: 2468 - DNA, 20 bp, artificial
  human GFAT antisense
aatgcactactgtaatattt

SEQ ID NO: 2469 - DNA, 20 bp, artificial
  human GFAT antisense
gagacccaccaatgcactac

SEQ ID NO: 2470 - DNA, 20 bp, artificial
  human GFAT antisense
gtacatcaaattctatatcc

SEQ ID NO: 2471 - DNA, 20 bp, artificial
  human GFAT antisense
gacagactctggctgctcaa

SEQ ID NO: 2472 - DNA, 20 bp, artificial
  human GFAT antisense
atccttcaaaccacccaaat

SEQ ID NO: 2473 - DNA, 20 bp, artificial
  human GFAT antisense
tcagctcctcaagaacttga

SEQ ID NO: 2474 - DNA, 20 bp, artificial
  human GFAT antisense
tccttacagtaacgaagacc

SEQ ID NO: 2475 - DNA, 20 bp, artificial
  human GFAT antisense
aggtggaaagccagcaactg

SEQ ID NO: 2476 - DNA, 20 bp, artificial
  human GFAT antisense
tagcctctcagcacagcaag

SEQ ID NO: 2477 - DNA, 20 bp, artificial
  human GFAT antisense
tttcaaaataaatcacatct

SEQ ID NO: 2478 - DNA, 20 bp, artificial
  human GFAT antisense
gataatagacaacaagtctg

SEQ ID NO: 2479 - DNA, 20 bp, artificial
  human GFAT antisense
catcccatcttcaaatttaa

SEQ ID NO: 2480 - DNA, 20 bp, artificial
  human GFAT antisense
tagcctttgctttccaaaaa

SEQ ID NO: 2481 - DNA, 20 bp, artificial
  human GFAT antisense
acacttttaaacacaagtgc

SEQ ID NO: 2482 - DNA, 20 bp, artificial
  human GFAT antisense
atcatcttccagaaagatga

SEQ ID NO: 2483 - DNA, 20 bp, artificial
  human GFAT antisense
caaacgccggcatctctgga

SEQ ID NO: 2484 - DNA, 20 bp, artificial
  human GFAT antisense
aagtatctgctgtctcacct

SEQ ID NO: 2485 - DNA, 20 bp, artificial
  human GFAT antisense
acaaattaccacaggccgcc

SEQ ID NO: 2486 - DNA, 20 bp, artificial
  human GFAT antisense
gtccactgagtggggcacct

SEQ ID NO: 2487 - DNA, 20 bp, artificial
  human GFAT antisense
ggaaaatgtaagaggtaact

SEQ ID NO: 2488 - DNA, 20 bp, artificial
  human GFAT antisense
accaataaaatttttcagtt

SEQ ID NO: 2489 - DNA, 20 bp, artificial
  human GFAT antisense
ctaccaataaaatttttcag

SEQ ID NO: 2490 - DNA, 20 bp, artificial
  human GFAT antisense
cttcctaaatttcttccacc

SEQ ID NO: 2491 - DNA, 20 bp, artificial
  human GFAT antisense
tgtgattttaaagaacaaga

SEQ ID NO: 2492 - DNA, 20 bp, artificial
  human GFAT antisense
tcttaataagctgggttttg

SEQ ID NO: 2493 - DNA, 20 bp, artificial
  human GFAT antisense
gtgtacatcaaattctatat

SEQ ID NO: 2494 - DNA, 20 bp, artificial
  human GFAT antisense
actccgtacaccaatcaaca

SEQ ID NO: 2495 - DNA, 20 bp, artificial
  human GFAT antisense
aggaatgtgatcagtagaaa

SEQ ID NO: 2496 - DNA, 20 bp, artificial
  human GFAT antisense
ggaaaaggcaggttgtgctg

SEQ ID NO: 2497 - DNA, 20 bp, artificial
  human GFAT antisense
tgttctatgacagcacttgc

SEQ ID NO: 2498 - DNA, 20 bp, artificial
  human GFAT antisense
caccagcatggtaacttgtt

SEQ ID NO: 2499 - DNA, 20 bp, artificial
  human GFAT antisense
tcctcaagaacttgacgtgt

SEQ ID NO: 2500 - DNA, 20 bp, artificial
  human GFAT antisense
caaattaccacaggccgccc

SEQ ID NO: 2501 - DNA, 20 bp, artificial
  human GFAT antisense
attctttaaagaaaataata

SEQ ID NO: 2502 - DNA, 20 bp, artificial
  human GFAT antisense
acacccagcattctttaaag

SEQ ID NO: 2503 - DNA, 20 bp, artificial
  human GFAT antisense
aatgcaacacccagcattct

SEQ ID NO: 2504 - DNA, 20 bp, artificial
  human GFAT antisense
aaatttttcagttttaagtt

SEQ ID NO: 2505 - DNA, 20 bp, artificial
  human GFAT antisense
taccaataaaatttttcagt

SEQ ID NO: 2506 - DNA, 20 bp, artificial
  human GFAT antisense
aacttagatataaatcctac

SEQ ID NO: 2507 - DNA, 20 bp, artificial
  human GFAT antisense
gcagtcatttaaaaaataaa

SEQ ID NO: 2508 - DNA, 20 bp, artificial
  human GFAT antisense
agcctttgctttccaaaaac

SEQ ID NO: 2509 - DNA, 20 bp, artificial
  human GFAT antisense
gccagagggccatgtttcaa

SEQ ID NO: 2510 - DNA, 20 bp, artificial
  human GFAT antisense
ccctgcaagcagtccactga

SEQ ID NO: 2511 - DNA, 20 bp, artificial
  human GFAT antisense
agcctctcagcacagcaagg

SEQ ID NO: 2512 - DNA, 20 bp, artificial
  human GFAT antisense
tcaacatcatagcctctcag

SEQ ID NO: 2513 - DNA, 20 bp, artificial
  human GFAT antisense
ccgtgggaaatcaacatcat

SEQ ID NO: 2514 - DNA, 20 bp, artificial
  human GFAT antisense
ctcttaaaacttggcaaacc

SEQ ID NO: 2515 - DNA, 20 bp, artificial
  human GFAT antisense
taaatcctaccaataaaatt

SEQ ID NO: 2516 - DNA, 20 bp, artificial
  human GFAT antisense
ctaaggctaaccaaacttag

SEQ ID NO: 2517 - DNA, 20 bp, artificial
  human GFAT antisense
tgcttgcccgggaaaatgaa

SEQ ID NO: 2518 - DNA, 20 bp, artificial
  human GFAT antisense
tatctgctgtctcacctgat

SEQ ID NO: 2519 - DNA, 20 bp, artificial
  human GFAT antisense
gcaagcagtccactgagtgg

SEQ ID NO: 2520 - DNA, 20 bp, artificial
  human GFAT antisense
tgtatagatattcctcactc

SEQ ID NO: 2521 - DNA, 20 bp, artificial
  human GFAT antisense
ataattataactgatatata

SEQ ID NO: 2522 - DNA, 20 bp, artificial
  human GFAT antisense
caaaacagaaacaaatttca

SEQ ID NO: 2523 - DNA, 20 bp, artificial
  human GFAT antisense
gttaaggattgagacccacc

SEQ ID NO: 2524 - DNA, 20 bp, artificial
  human GFAT antisense
gtcatttaaaaaataaaaga

SEQ ID NO: 2525 - DNA, 20 bp, artificial
  human GFAT antisense
cacgagcttcggtgggcaat

SEQ ID NO: 2526 - DNA, 20 bp, artificial
  human GFAT antisense
ctccatcaaatcccacacca

SEQ ID NO: 2527 - DNA, 20 bp, artificial
  human GFAT antisense
ggaaaatgaacacttttaaa

SEQ ID NO: 2528 - DNA, 20 bp, artificial
  human GFAT antisense
gggaaaatgaacacttttaa

SEQ ID NO: 2529 - DNA, 20 bp, artificial
  human GFAT antisense
cgacagactctggctgctca

SEQ ID NO: 2530 - DNA, 20 bp, artificial
  human GFAT antisense
gcatggtaacttgttccaca

SEQ ID NO: 2531 - DNA, 20 bp, artificial
  human GFAT antisense
gctcctcaagaacttgacgt

SEQ ID NO: 2532 - DNA, 20 bp, artificial
  human GFAT antisense
gccctgcaagcagtccactg

SEQ ID NO: 2533 - DNA, 20 bp, artificial
  human GFAT antisense
taattataactgatatataa

SEQ ID NO: 2534 - DNA, 20 bp, artificial
  human GFAT antisense
aaatgtaagaggtaacttca

SEQ ID NO: 2535 - DNA, 20 bp, artificial
  human GFAT antisense
ataaatcctaccaataaaat

SEQ ID NO: 2536 - DNA, 20 bp, artificial
  human GFAT antisense
cctaaatttcttccacctac

SEQ ID NO: 2537 - DNA, 20 bp, artificial
  human GFAT antisense
cttcttaataagctgggttt

SEQ ID NO: 2538 - DNA, 20 bp, artificial
  human GFAT antisense
tatccaaatccatatcttgt

SEQ ID NO: 2539 - DNA, 20 bp, artificial
  human GFAT antisense
tgcctgttctgtagagtata

SEQ ID NO: 2540 - DNA, 20 bp, artificial
  human GFAT antisense
tttgcctgttctgtagagta

SEQ ID NO: 2541 - DNA, 20 bp, artificial
  human GFAT antisense
aggcaggttgtgctgtccac

SEQ ID NO: 2542 - DNA, 20 bp, artificial
  human GFAT antisense
aagacccatcaaagtatctg

SEQ ID NO: 2543 - DNA, 20 bp, artificial
  human GFAT antisense
ttccaatatagattccatta

SEQ ID NO: 2544 - DNA, 20 bp, artificial
  human GFAT antisense
attccaatatagattccatt

SEQ ID NO: 2545 - DNA, 20 bp, artificial
  human GFAT antisense
gaagtggagggtccagaaat

SEQ ID NO: 2546 - DNA, 20 bp, artificial
  human GFAT antisense
ttgtcttctcagattgaagt

SEQ ID NO: 2547 - DNA, 20 bp, artificial
  human GFAT antisense
acatcttctcttaaaacttg

SEQ ID NO: 2548 - DNA, 20 bp, artificial
  human GFAT antisense
cacatcccatcttcaaattt

SEQ ID NO: 2549 - DNA, 20 bp, artificial
  human GFAT antisense
aatcccacaccagcagaatc

SEQ ID NO: 2550 - DNA, 20 bp, artificial
  human GFAT antisense
agaaagtttatgttcactcc

SEQ ID NO: 2551 - DNA, 20 bp, artificial
  human GFAT antisense
cacaatctgtctcccgtgat

SEQ ID NO: 2552 - DNA, 20 bp, artificial
  human GFAT antisense
tcatccatgctcagtacttc

SEQ ID NO: 2553 - DNA, 20 bp, artificial
  human GFAT antisense
aagccagagggccatgtttc

SEQ ID NO: 2554 - DNA, 20 bp, artificial
  human GFAT antisense
tacagtcacagatttggcaa

SEQ ID NO: 2555 - DNA, 20 bp, artificial
  human GFAT antisense
cactctacagtcacagattt

SEQ ID NO: 2556 - DNA, 20 bp, artificial
  human GFAT antisense
ccaatatagattccattatt

SEQ ID NO: 2557 - DNA, 20 bp, artificial
  human GFAT antisense
attgtcttctcagattgaag

SEQ ID NO: 2558 - DNA, 20 bp, artificial
  human GFAT antisense
ccaatgcactactgtaatat

SEQ ID NO: 2559 - DNA, 20 bp, artificial
  human GFAT antisense
aatatgtcattcagcagtca

SEQ ID NO: 2560 - DNA, 20 bp, artificial
  human GFAT antisense
tgtgttctatgacagcactt

SEQ ID NO: 2561 - DNA, 20 bp, artificial
  human GFAT antisense
tgcgtctttcttgcatggag

SEQ ID NO: 2562 - DNA, 20 bp, artificial
  human GFAT antisense
agcatgatctctttgcgtct

SEQ ID NO: 2563 - DNA, 20 bp, artificial
  human GFAT antisense
tgaatttcgtcatccatgct

SEQ ID NO: 2564 - DNA, 20 bp, artificial
  human GFAT antisense
caattcaccagcaaggatgc

SEQ ID NO: 2565 - DNA, 20 bp, artificial
  human GFAT antisense
gagggccatgtttcaattca

SEQ ID NO: 2566 - DNA, 20 bp, artificial
  human GFAT antisense
ctacagtcacagatttggca

SEQ ID NO: 2567 - DNA, 20 bp, artificial
  human GFAT antisense
cagcagtcatttaaaaaata

SEQ ID NO: 2568 - DNA, 20 bp, artificial
  human GFAT antisense
atccaccaaagccagagggc

SEQ ID NO: 2569 - DNA, 20 bp, artificial
  human GFAT antisense
ccctgccgagcaaccacttg

SEQ ID NO: 2570 - DNA, 20 bp, artificial
  human GFAT antisense
gcagtccactgagtggggca

SEQ ID NO: 2571 - DNA, 20 bp, artificial
  human GFAT antisense
cgtgggaaatcaacatcata

SEQ ID NO: 2572 - DNA, 20 bp, artificial
  human GFAT antisense
tccaatatagattccattat

SEQ ID NO: 2573 - DNA, 20 bp, artificial
  human GFAT antisense
aaatttcaaaataaatcaca

SEQ ID NO: 2574 - DNA, 20 bp, artificial
  human GFAT antisense
atataaatcctaccaataaa

SEQ ID NO: 2575 - DNA, 20 bp, artificial
  human GFAT antisense
atcccatcttcaaatttaaa

SEQ ID NO: 2576 - DNA, 20 bp, artificial
  human GFAT antisense
gaacaagataaaatatgtca

SEQ ID NO: 2577 - DNA, 20 bp, artificial
  human GFAT antisense
ttttgcaggcattggcttcc

SEQ ID NO: 2578 - DNA, 20 bp, artificial
  human GFAT antisense
tctatatccaaatccatatc

SEQ ID NO: 2579 - DNA, 20 bp, artificial
  human GFAT antisense
gaacacttttaaacacaagt

SEQ ID NO: 2580 - DNA, 20 bp, artificial
  human GFAT antisense
cgggaaaatgaacactttta

SEQ ID NO: 2581 - DNA, 20 bp, artificial
  human GFAT antisense
ggcaggttgtgctgtccaca

SEQ ID NO: 2582 - DNA, 20 bp, artificial
  human GFAT antisense
ccacagttaaagctcctctc

SEQ ID NO: 2583 - DNA, 20 bp, artificial
  human GFAT antisense
tcccgtgatatggaactgcc

SEQ ID NO: 2584 - DNA, 20 bp, artificial
  human GFAT antisense
gcaaacatcacaagggatac

SEQ ID NO: 2585 - DNA, 20 bp, artificial
  human GFAT antisense
catccatgctcagtacttcc

SEQ ID NO: 2586 - DNA, 20 bp, artificial
  human GFAT antisense
cctcgtcccattatcagaac

SEQ ID NO: 2587 - DNA, 20 bp, artificial
  human GFAT antisense
cagattccaatatagattcc

SEQ ID NO: 2588 - DNA, 20 bp, artificial
  human GFAT antisense
tataaatcctaccaataaaa

SEQ ID NO: 2589 - DNA, 20 bp, artificial
  human GFAT antisense
tgacagcacttgcatcagaa

SEQ ID NO: 2590 - DNA, 20 bp, artificial
  human GFAT antisense
tgttgctacaccagcatggt

SEQ ID NO: 2591 - DNA, 20 bp, artificial
  human GFAT antisense
cagctcctcaagaacttgac

SEQ ID NO: 2592 - DNA, 20 bp, artificial
  human GFAT antisense
tgctgtctcacctgattgac

SEQ ID NO: 2593 - DNA, 20 bp, artificial
  human GFAT antisense
gtatctgctgtctcacctga

SEQ ID NO: 2594 - DNA, 20 bp, artificial
  human GFAT antisense
atggaactgccaactgtgtt

SEQ ID NO: 2595 - DNA, 20 bp, artificial
  human GFAT antisense
aaactggctggtataagcct

SEQ ID NO: 2596 - DNA, 20 bp, artificial
  human GFAT antisense
caaagccagagggccatgtt

SEQ ID NO: 2597 - DNA, 20 bp, artificial
  human GFAT antisense
aagagcattctgacacttgg

SEQ ID NO: 2598 - DNA, 20 bp, artificial
  human GFAT antisense
gcaagattccgtgggaaatc

SEQ ID NO: 2599 - DNA, 20 bp, artificial
  human GFAT antisense
tgatatataaataaggattt

SEQ ID NO: 2600 - DNA, 20 bp, artificial
  human GFAT antisense
gattccaatatagattccat

SEQ ID NO: 2601 - DNA, 20 bp, artificial
  human GFAT antisense
aagtggagggtccagaaatg

SEQ ID NO: 2602 - DNA, 20 bp, artificial
  human GFAT antisense
aaaatttttcagttttaagt

SEQ ID NO: 2603 - DNA, 20 bp, artificial
  human GFAT antisense
aaatatgttaaggattgaga

SEQ ID NO: 2604 - DNA, 20 bp, artificial
  human GFAT antisense
gttttgcaggcattggcttc

SEQ ID NO: 2605 - DNA, 20 bp, artificial
  human GFAT antisense
tacatcaaattctatatcca

SEQ ID NO: 2606 - DNA, 20 bp, artificial
  human GFAT antisense
ctttaaagaaaataatagct

SEQ ID NO: 2607 - DNA, 20 bp, artificial
  human GFAT antisense
tctttaaagaaaataatagc

SEQ ID NO: 2608 - DNA, 20 bp, artificial
  human GFAT antisense
ataatagacaacaagtctga

SEQ ID NO: 2609 - DNA, 20 bp, artificial
  human GFAT antisense
tgttaaggattgagacccac

SEQ ID NO: 2610 - DNA, 20 bp, artificial
  human GFAT antisense
gtgattttaaagaacaagat

SEQ ID NO: 2611 - DNA, 20 bp, artificial
  human GFAT antisense
atgaacacttttaaacacaa

SEQ ID NO: 2612 - DNA, 20 bp, artificial
  human GFAT antisense
actgcttgcccgggaaaatg

SEQ ID NO: 2613 - DNA, 20 bp, artificial
  human GFAT antisense
tacaccagcatggtaacttg

SEQ ID NO: 2614 - DNA, 20 bp, artificial
  human GFAT antisense
atctcgaaagactggtgtgt

SEQ ID NO: 2615 - DNA, 20 bp, artificial
  human GFAT antisense
ctcccgtgatatggaactgc

SEQ ID NO: 2616 - DNA, 20 bp, artificial
  human GFAT antisense
agagggccatgtttcaattc

SEQ ID NO: 2617 - DNA, 20 bp, artificial
  human GFAT antisense
atcaacatcatagcctctca

SEQ ID NO: 2618 - DNA, 20 bp, artificial
  human GFAT antisense
cttggcaaacccttccctaa

SEQ ID NO: 2619 - DNA, 20 bp, artificial
  human GFAT antisense
caataaaatttttcagtttt

SEQ ID NO: 2620 - DNA, 20 bp, artificial
  human GFAT antisense
tcatttaaaaaataaaagac

SEQ ID NO: 2621 - DNA, 20 bp, artificial
  human GFAT antisense
aataagctgggttttgcagg

SEQ ID NO: 2622 - DNA, 20 bp, artificial
  human GFAT antisense
gaaaatgaacacttttaaac

SEQ ID NO: 2623 - DNA, 20 bp, artificial
  human GFAT antisense
gagtataggaatgtgatcag

SEQ ID NO: 2624 - DNA, 20 bp, artificial
  human GFAT antisense
tgcacagctcgtccggggtg

SEQ ID NO: 2625 - DNA, 20 bp, artificial
  human GFAT antisense
tccaccaaagccagagggcc

SEQ ID NO: 2626 - DNA, 20 bp, artificial
  human GFAT antisense
aagaaaataatagctagaat

SEQ ID NO: 2627 - DNA, 20 bp, artificial
  human GFAT antisense
aaacaaatttcaaaataaat

SEQ ID NO: 2628 - DNA, 20 bp, artificial
  human GFAT antisense
tccatcaaatcccacaccag

SEQ ID NO: 2629 - DNA, 20 bp, artificial
  human GFAT antisense
cacttgcatcagaagcaaag

SEQ ID NO: 2630 - DNA, 20 bp, artificial
  human GFAT antisense
acgacagactctggctgctc

SEQ ID NO: 2631 - DNA, 20 bp, artificial
  human GFAT antisense
aagcatgatctctttgcgtc

SEQ ID NO: 2632 - DNA, 20 bp, artificial
  human GFAT antisense
ccaaagccagagggccatgt

SEQ ID NO: 2633 - DNA, 20 bp, artificial
  human GFAT antisense
tgctgaagagcattctgaca

SEQ ID NO: 2634 - DNA, 20 bp, artificial
  human GFAT antisense
ggaataattataactgatat

SEQ ID NO: 2635 - DNA, 20 bp, artificial
  human GFAT antisense
gatataaatcctaccaataa

SEQ ID NO: 2636 - DNA, 20 bp, artificial
  human GFAT antisense
taaggattgagacccaccaa

SEQ ID NO: 2637 - DNA, 20 bp, artificial
  human GFAT antisense
tcttcaaatttaaaatcata

SEQ ID NO: 2638 - DNA, 20 bp, artificial
  human GFAT antisense
aacaagataaaatatgtcat

SEQ ID NO: 2639 - DNA, 20 bp, artificial
  human GFAT antisense
ttaataagctgggttttgca

SEQ ID NO: 2640 - DNA, 20 bp, artificial
  human GFAT antisense
aagtttatgttcactccgta

SEQ ID NO: 2641 - DNA, 20 bp, artificial
  human GFAT antisense
gaaagtttatgttcactccg

SEQ ID NO: 2642 - DNA, 20 bp, artificial
  human GFAT antisense
ctggtataagcctttgtact

SEQ ID NO: 2643 - DNA, 20 bp, artificial
  human GFAT antisense
ccactgagtggggcaccttg

SEQ ID NO: 2644 - DNA, 20 bp, artificial
  human GFAT antisense
tttctgatacagattccaat

SEQ ID NO: 2645 - DNA, 20 bp, artificial
  human GFAT antisense
acaagataaaatatgtcatt

SEQ ID NO: 2646 - DNA, 20 bp, artificial
  human GFAT antisense
ctcgaaagactggtgtgttt

SEQ ID NO: 2647 - DNA, 20 bp, artificial
  human GFAT antisense
acaaactggctggtataagc

SEQ ID NO: 2648 - DNA, 20 bp, artificial
  human GFAT antisense
tgccctgcaagcagtccact

SEQ ID NO: 2649 - DNA, 20 bp, artificial
  human GFAT antisense
gatattcctcactctacagt

SEQ ID NO: 2650 - DNA, 20 bp, artificial
  human GFAT antisense
taaggctaaccaaacttaga

SEQ ID NO: 2651 - DNA, 20 bp, artificial
  human GFAT antisense
tcccatcttcaaatttaaaa

SEQ ID NO: 2652 - DNA, 20 bp, artificial
  human GFAT antisense
ggttttgcaggcattggctt

SEQ ID NO: 2653 - DNA, 20 bp, artificial
  human GFAT antisense
aaagccagagggccatgttt

SEQ ID NO: 2654 - DNA, 20 bp, artificial
  human GFAT antisense
cctctcagcacagcaaggtg

SEQ ID NO: 2655 - DNA, 20 bp, artificial
  human GFAT antisense
gtgggaaatcaacatcatag

SEQ ID NO: 2656 - DNA, 20 bp, artificial
  human GFAT antisense
aataattataactgatatat

SEQ ID NO: 2657 - DNA, 20 bp, artificial
  human GFAT antisense
attcaaagtcctccacaaat

SEQ ID NO: 2658 - DNA, 20 bp, artificial
  human GFAT antisense
catcttctcttaaaacttgg

SEQ ID NO: 2659 - DNA, 20 bp, artificial
  human GFAT antisense
gcttcctaaatttcttccac

SEQ ID NO: 2660 - DNA, 20 bp, artificial
  human GFAT antisense
aagataaaatatgtcattca

SEQ ID NO: 2661 - DNA, 20 bp, artificial
  human GFAT antisense
caagataaaatatgtcattc

SEQ ID NO: 2662 - DNA, 20 bp, artificial
  human GFAT antisense
gttgctacaccagcatggta

SEQ ID NO: 2663 - DNA, 20 bp, artificial
  human GFAT antisense
agtatctgctgtctcacctg

SEQ ID NO: 2664 - DNA, 20 bp, artificial
  human GFAT antisense
ctcagtacttccttaatcaa

SEQ ID NO: 2665 - DNA, 20 bp, artificial
  human GFAT antisense
cagagggccatgtttcaatt

SEQ ID NO: 2666 - DNA, 20 bp, artificial
  human GFAT antisense
ctgagtggggcaccttgatc

SEQ ID NO: 2667 - DNA, 20 bp, artificial
  human GFAT antisense
atattcctcactctacagtc

SEQ ID NO: 2668 - DNA, 20 bp, artificial
  human GFAT antisense
cattctttaaagaaaataat

SEQ ID NO: 2669 - DNA, 20 bp, artificial
  human GFAT antisense
tccagaaatgcaacacccag

SEQ ID NO: 2670 - DNA, 20 bp, artificial
  human GFAT antisense
taataagctgggttttgcag

SEQ ID NO: 2671 - DNA, 20 bp, artificial
  human GFAT antisense
tgtacatcaaattctatatc

SEQ ID NO: 2672 - DNA, 20 bp, artificial
  human GFAT antisense
gaaaaggcaggttgtgctgt

SEQ ID NO: 2673 - DNA, 20 bp, artificial
  human GFAT antisense
aaacgccggcatctctggat

SEQ ID NO: 2674 - DNA, 20 bp, artificial
  human GFAT antisense
cctcaagaacttgacgtgtt

SEQ ID NO: 2675 - DNA, 20 bp, artificial
  human GFAT antisense
agggatacaaactggctggt

SEQ ID NO: 2676 - DNA, 20 bp, artificial
  human GFAT antisense
ttaatcaaatcaggcagccg

SEQ ID NO: 2677 - DNA, 20 bp, artificial
  human GFAT antisense
atccatgctcagtacttcct

SEQ ID NO: 2678 - DNA, 20 bp, artificial
  human GFAT antisense
tcactctacagtcacagatt

SEQ ID NO: 2679 - DNA, 20 bp, artificial
  human GFAT antisense
aaacttagatataaatccta

SEQ ID NO: 2680 - DNA, 20 bp, artificial
  human GFAT antisense
gacaacaagtctgagaaact

SEQ ID NO: 2681 - DNA, 20 bp, artificial
  human GFAT antisense
agtcatttaaaaaataaaag

SEQ ID NO: 2682 - DNA, 20 bp, artificial
  human GFAT antisense
tgcaggcattggcttcccaa

SEQ ID NO: 2683 - DNA, 20 bp, artificial
  human GFAT antisense
cttgcccgggaaaatgaaca

SEQ ID NO: 2684 - DNA, 20 bp, artificial
  human GFAT antisense
gcttgcccgggaaaatgaac

SEQ ID NO: 2685 - DNA, 20 bp, artificial
  human GFAT antisense
attcgatggatagaaagacg

SEQ ID NO: 2686 - DNA, 20 bp, artificial
  human GFAT antisense
ggtaacttgttccacaagca

SEQ ID NO: 2687 - DNA, 20 bp, artificial
  human GFAT antisense
agcatggtaacttgttccac

SEQ ID NO: 2688 - DNA, 20 bp, artificial
  human GFAT antisense
ctacaccagcatggtaactt

SEQ ID NO: 2689 - DNA, 20 bp, artificial
  human GFAT antisense
tcatctcgaaagactggtgt

SEQ ID NO: 2690 - DNA, 20 bp, artificial
  human GFAT antisense
actgagtggggcaccttgat

SEQ ID NO: 2691 - DNA, 20 bp, artificial
  human GFAT antisense
gtggaaagccagcaactgta

SEQ ID NO: 2692 - DNA, 20 bp, artificial
  human GFAT antisense
agattccaatatagattcca

SEQ ID NO: 2693 - DNA, 20 bp, artificial
  human GFAT antisense
gcacacacgagcttcggtgg

SEQ ID NO: 2694 - DNA, 20 bp, artificial
  human GFAT antisense
tgaacacttttaaacacaag

SEQ ID NO: 2695 - DNA, 20 bp, artificial
  human GFAT antisense
caaacatcacaagggataca

SEQ ID NO: 2696 - DNA, 20 bp, artificial
  human GFAT antisense
gctcagtacttccttaatca

SEQ ID NO: 2697 - DNA, 20 bp, artificial
  human GFAT antisense
tccatgctcagtacttcctt

SEQ ID NO: 2698 - DNA, 20 bp, artificial
  human GFAT antisense
cacccagcattctttaaaga

SEQ ID NO: 2699 - DNA, 20 bp, artificial
  human GFAT antisense
ataagctgggttttgcaggc

SEQ ID NO: 2700 - DNA, 20 bp, artificial
  human GFAT antisense
agtttatgttcactccgtac

SEQ ID NO: 2701 - DNA, 20 bp, artificial
  human GFAT antisense
gcctgttctgtagagtatag

SEQ ID NO: 2702 - DNA, 20 bp, artificial
  human GFAT antisense
gagtgtttgcacagctcgtc

SEQ ID NO: 2703 - DNA, 20 bp, artificial
  human GFAT antisense
catggtaacttgttccacaa

SEQ ID NO: 2704 - DNA, 20 bp, artificial
  human GFAT antisense
gggatacaaactggctggta

SEQ ID NO: 2705 - DNA, 20 bp, artificial
  human GFAT antisense
ctctcagcacagcaaggtgg

SEQ ID NO: 2706 - DNA, 20 bp, artificial
  human GFAT antisense
gatacagattccaatataga

SEQ ID NO: 2707 - DNA, 20 bp, artificial
  human GFAT antisense
atcttcaaatttaaaatcat

SEQ ID NO: 2708 - DNA, 20 bp, artificial
  human GFAT antisense
aaaatgaacacttttaaaca

SEQ ID NO: 2709 - DNA, 20 bp, artificial
  human GFAT antisense
cagcatggtaacttgttcca

SEQ ID NO: 2710 - DNA, 20 bp, artificial
  human GFAT antisense
tggtataagcctttgtactg

SEQ ID NO: 2711 - DNA, 20 bp, artificial
  human GFAT antisense
atacaaactggctggtataa

SEQ ID NO: 2712 - DNA, 20 bp, artificial
  human GFAT antisense
tattcctcactctacagtca

SEQ ID NO: 2713 - DNA, 20 bp, artificial
  human GFAT antisense
gcacttgcatcagaagcaaa

SEQ ID NO: 2714 - DNA, 20 bp, artificial
  human GFAT antisense
tatggaactgccaactgtgt

SEQ ID NO: 2715 - DNA, 20 bp, artificial
  human GFAT antisense
tggaataattataactgata

SEQ ID NO: 2716 - DNA, 20 bp, artificial
  human GFAT antisense
accaaacttagatataaatc

SEQ ID NO: 2717 - DNA, 20 bp, artificial
  human GFAT antisense
aaggctaaccaaacttagat

SEQ ID NO: 2718 - DNA, 20 bp, artificial
  human GFAT antisense
agacaacaagtctgagaaac

SEQ ID NO: 2719 - DNA, 20 bp, artificial
  human GFAT antisense
agaacaagataaaatatgtc

SEQ ID NO: 2720 - DNA, 20 bp, artificial
  human GFAT antisense
ctgcaacatcatcatcttcc

SEQ ID NO: 2721 - DNA, 20 bp, artificial
  human GFAT antisense
agttcgtttaattcgatgga

SEQ ID NO: 2722 - DNA, 20 bp, artificial
  human GFAT antisense
gtgttgctacaccagcatgg

SEQ ID NO: 2723 - DNA, 20 bp, artificial
  human GFAT antisense
cagtacttccttaatcaaat

SEQ ID NO: 2724 - DNA, 20 bp, artificial
  human GFAT antisense
tattcaaagtcctccacaaa

SEQ ID NO: 2725 - DNA, 20 bp, artificial
  human GFAT antisense
tgtcttctcagattgaagtg

SEQ ID NO: 2726 - DNA, 20 bp, artificial
  human GFAT antisense
catttaaaaaataaaagact

SEQ ID NO: 2727 - DNA, 20 bp, artificial
  human GFAT antisense
aaatatgtcattcagcagtc

SEQ ID NO: 2728 - DNA, 20 bp, artificial
  human GFAT antisense
ctttcttcttaataagctgg

SEQ ID NO: 2729 - DNA, 20 bp, artificial
  human GFAT antisense
acgtgttgctacaccagcat

SEQ ID NO: 2730 - DNA, 20 bp, artificial
  human GFAT antisense
gttaaagctcctctctcctt

SEQ ID NO: 2731 - DNA, 20 bp, artificial
  human GFAT antisense
ttattcaaagtcctccacaa

SEQ ID NO: 2732 - DNA, 20 bp, artificial
  human GFAT antisense
catcttcaaatttaaaatca

SEQ ID NO: 2733 - DNA, 20 bp, artificial
  human GFAT antisense
cccatcttcaaatttaaaat

SEQ ID NO: 2734 - DNA, 20 bp, artificial
  human GFAT antisense
gagtggctggcgggatcggg

SEQ ID NO: 2735 - DNA, 20 bp, artificial
  human GFAT antisense
tcttcttaataagctgggtt

SEQ ID NO: 2736 - DNA, 20 bp, artificial
  human GFAT antisense
gtacaccaatcaacagaggg

SEQ ID NO: 2737 - DNA, 20 bp, artificial
  human GFAT antisense
gacgtgttgctacaccagca

SEQ ID NO: 2738 - DNA, 20 bp, artificial
  human GFAT antisense
tctgctgtctcacctgattg

SEQ ID NO: 2739 - DNA, 20 bp, artificial
  human GFAT antisense
ccgtgatatggaactgccaa

SEQ ID NO: 2740 - DNA, 20 bp, artificial
  human GFAT antisense
cccgtgatatggaactgcca

SEQ ID NO: 2741 - DNA, 20 bp, artificial
  human GFAT antisense
tcagtacttccttaatcaaa

SEQ ID NO: 2742 - DNA, 20 bp, artificial
  human GFAT antisense
gaaaatgtaagaggtaactt

SEQ ID NO: 2743 - DNA, 20 bp, artificial
  human GFAT antisense
caaacttagatataaatcct

SEQ ID NO: 2744 - DNA, 20 bp, artificial
  human GFAT antisense
agcacttgcatcagaagcaa

SEQ ID NO: 2745 - DNA, 20 bp, artificial
  human GFAT antisense
ctgctgtctcacctgattga

SEQ ID NO: 2746 - DNA, 20 bp, artificial
  human GFAT antisense
cagtccactgagtggggcac

SEQ ID NO: 2747 - DNA, 20 bp, artificial
  human GFAT antisense
gcaaggtggaaagccagcaa

SEQ ID NO: 2748 - DNA, 20 bp, artificial
  human GFAT antisense
ctcactctacagtcacagat

SEQ ID NO: 2749 - DNA, 20 bp, artificial
  human GFAT antisense
gcattctttaaagaaaataa

SEQ ID NO: 2750 - DNA, 20 bp, artificial
  human GFAT antisense
ttaaaaaataaaagactaca

SEQ ID NO: 2751 - DNA, 20 bp, artificial
  human GFAT antisense
cagtcatttaaaaaataaaa

SEQ ID NO: 2752 - DNA, 20 bp, artificial
  human GFAT antisense
atatccaaatccatatcttg

SEQ ID NO: 2753 - DNA, 20 bp, artificial
  human GFAT antisense
tcgaaagactggtgtgtttc

SEQ ID NO: 2754 - DNA, 20 bp, artificial
  human GFAT antisense
ctgaatttcgtcatccatgc

SEQ ID NO: 2755 - DNA, 20 bp, artificial
  human GFAT antisense
aatcaacatcatagcctctc

SEQ ID NO: 2756 - DNA, 20 bp, artificial
  human GFAT antisense
ttctttaaagaaaataatag

SEQ ID NO: 2757 - DNA, 20 bp, artificial
  human GFAT antisense
gtggagggtccagaaatgca

SEQ ID NO: 2758 - DNA, 20 bp, artificial
  human GFAT antisense
agtggagggtccagaaatgc

SEQ ID NO: 2759 - DNA, 20 bp, artificial
  human GFAT antisense
ctggcgggatcgggggtgca

SEQ ID NO: 2760 - DNA, 20 bp, artificial
  human GFAT antisense
aacacttttaaacacaagtg

SEQ ID NO: 2761 - DNA, 20 bp, artificial
  human GFAT antisense
cgtacaccaatcaacagagg

SEQ ID NO: 2762 - DNA, 20 bp, artificial
  human GFAT antisense
tagaaacatattgtcttctc

SEQ ID NO: 2763 - DNA, 20 bp, artificial
  human GFAT antisense
aaccaaacttagatataaat

SEQ ID NO: 2764 - DNA, 20 bp, artificial
  human GFAT antisense
tggcttcccaatctttatca

SEQ ID NO: 2765 - DNA, 20 bp, artificial
  human GFAT antisense
gggttttgcaggcattggct

SEQ ID NO: 2766 - DNA, 20 bp, artificial
  human GFAT antisense
cgtgttgctacaccagcatg

SEQ ID NO: 2767 - DNA, 20 bp, artificial
  human GFAT antisense
aatctgtctcccgtgatatg

SEQ ID NO: 2768 - DNA, 20 bp, artificial
  human GFAT antisense
ttgctgaagagcattctgac

SEQ ID NO: 2769 - DNA, 20 bp, artificial
  human GFAT antisense
aacaaaacagaaacaaattt

SEQ ID NO: 2770 - DNA, 20 bp, artificial
  human GFAT antisense
tagacaacaagtctgagaaa

SEQ ID NO: 2771 - DNA, 20 bp, artificial
  human GFAT antisense
cgaaagactggtgtgtttct

SEQ ID NO: 2772 - DNA, 20 bp, artificial
  human GFAT antisense
ttctgatacagattccaata

SEQ ID NO: 2773 - DNA, 20 bp, artificial
  human GFAT antisense
atagacaacaagtctgagaa

SEQ ID NO: 2774 - DNA, 20 bp, artificial
  human GFAT antisense
acctacagataatagacaac

SEQ ID NO: 2775 - DNA, 20 bp, artificial
  human GFAT antisense
ttcactccgtacaccaatca

SEQ ID NO: 2776 - DNA, 20 bp, artificial
  human GFAT antisense
aaagtttatgttcactccgt

SEQ ID NO: 2777 - DNA, 20 bp, artificial
  human GFAT antisense
tctcccgtgatatggaactg

SEQ ID NO: 2778 - DNA, 20 bp, artificial
  human GFAT antisense
cgagcaaccacttgctgaag

SEQ ID NO: 2779 - DNA, 20 bp, artificial
  human GFAT antisense
aaatgcaacacccagcattc

SEQ ID NO: 2780 - DNA, 20 bp, artificial
  human GFAT antisense
ggattgagacccaccaatgc

SEQ ID NO: 2781 - DNA, 20 bp, artificial
  human GFAT antisense
ggaatgtgatcagtagaaag

SEQ ID NO: 2782 - DNA, 20 bp, artificial
  human GFAT antisense
ttgtctttgcctgttctgta

SEQ ID NO: 2783 - DNA, 20 bp, artificial
  human GFAT antisense
ttgcagcttcctttcttgtc

SEQ ID NO: 2784 - DNA, 20 bp, artificial
  human GFAT antisense
gacagcacttgcatcagaag

SEQ ID NO: 2785 - DNA, 20 bp, artificial
  human GFAT antisense
ttaaagctcctctctcctta

SEQ ID NO: 2786 - DNA, 20 bp, artificial
  human GFAT antisense
cgtgatatggaactgccaac

SEQ ID NO: 2787 - DNA, 20 bp, artificial
  human GFAT antisense
aggctaaccaaacttagata

SEQ ID NO: 2788 - DNA, 20 bp, artificial
  human GFAT antisense
gtctgagaaactaaggctaa

SEQ ID NO: 2789 - DNA, 20 bp, artificial
  human GFAT antisense
tttaaaaaataaaagactac

SEQ ID NO: 2790 - DNA, 20 bp, artificial
  human GFAT antisense
ccagagggccatgtttcaat

SEQ ID NO: 2791 - DNA, 20 bp, artificial
  human GFAT antisense
gagcaaccacttgctgaaga

SEQ ID NO: 2792 - DNA, 20 bp, artificial
  human GFAT antisense
ggaaatcaacatcatagcct

SEQ ID NO: 2793 - DNA, 20 bp, artificial
  human GFAT antisense
acaaaacagaaacaaatttc

SEQ ID NO: 2794 - DNA, 20 bp, artificial
  human GFAT antisense
aaacaaaacagaaacaaatt

SEQ ID NO: 2795 - DNA, 20 bp, artificial
  human GFAT antisense
ttcttcttaataagctgggt

SEQ ID NO: 2796 - DNA, 20 bp, artificial
  human GFAT antisense
ccaaacttagatataaatcc

SEQ ID NO: 2797 - DNA, 20 bp, artificial
  human GFAT antisense
taatagacaacaagtctgag

SEQ ID NO: 2798 - DNA, 20 bp, artificial
  human GFAT antisense
taagctgggttttgcaggca

SEQ ID NO: 2799 - DNA, 20 bp, artificial
  human GFAT antisense
cagcacttgcatcagaagca

SEQ ID NO: 2800 - DNA, 20 bp, artificial
  human GFAT antisense
gttcgtttaattcgatggat

SEQ ID NO: 2801 - DNA, 20 bp, artificial
  human GFAT antisense
acatcatctcgaaagactgg

SEQ ID NO: 2802 - DNA, 20 bp, artificial
  human GFAT antisense
agaaacaaatttcaaaataa

SEQ ID NO: 2803 - DNA, 20 bp, artificial
  human GFAT antisense
ataaaatatgtcattcagca

SEQ ID NO: 2804 - DNA, 20 bp, artificial
  human GFAT antisense
tgattttaaagaacaagata

SEQ ID NO: 2805 - DNA, 20 bp, artificial
  human GFAT antisense
tgcagcttcctttcttgtct

SEQ ID NO: 2806 - DNA, 20 bp, artificial
  human GFAT antisense
tggtaacttgttccacaagc

SEQ ID NO: 2807 - DNA, 20 bp, artificial
  human GFAT antisense
gtctcccgtgatatggaact

SEQ ID NO: 2808 - DNA, 20 bp, artificial
  human GFAT antisense
agcagtccactgagtggggc

SEQ ID NO: 2809 - DNA, 20 bp, artificial
  human GFAT antisense
gaaatcaacatcatagcctc

SEQ ID NO: 2810 - DNA, 20 bp, artificial
  human GFAT antisense
acagattccaatatagattc

SEQ ID NO: 2811 - DNA, 20 bp, artificial
  human GFAT antisense
gattgagacccaccaatgca

SEQ ID NO: 2812 - DNA, 20 bp, artificial
  human GFAT antisense
catctcgaaagactggtgtg

SEQ ID NO: 2813 - DNA, 20 bp, artificial
  human GFAT antisense
atcatctcgaaagactggtg

SEQ ID NO: 2814 - DNA, 20 bp, artificial
  human GFAT antisense
agttaaagctcctctctcct

SEQ ID NO: 2815 - DNA, 20 bp, artificial
  human GFAT antisense
gtgatatggaactgccaact

SEQ ID NO: 2816 - DNA, 20 bp, artificial
  human GFAT antisense
cttccttaatcaaatcaggc

SEQ ID NO: 2817 - DNA, 20 bp, artificial
  human GFAT antisense
agatattcctcactctacag

SEQ ID NO: 2818 - DNA, 20 bp, artificial
  human GFAT antisense
aaaatatgtcattcagcagt

SEQ ID NO: 2819 - DNA, 20 bp, artificial
  human GFAT antisense
ctttgcctgttctgtagagt

SEQ ID NO: 2820 - DNA, 20 bp, artificial
  human GFAT antisense
atggtaacttgttccacaag

SEQ ID NO: 2821 - DNA, 20 bp, artificial
  human GFAT antisense
gctacaccagcatggtaact

SEQ ID NO: 2822 - DNA, 20 bp, artificial
  human GFAT antisense
aaacatcacaagggatacaa

SEQ ID NO: 2823 - DNA, 20 bp, artificial
  human GFAT antisense
tgggaaatcaacatcatagc

SEQ ID NO: 2824 - DNA, 20 bp, artificial
  human GFAT antisense
attcctcactctacagtcac

SEQ ID NO: 2825 - DNA, 20 bp, artificial
  human GFAT antisense
aattctatatccaaatccat

SEQ ID NO: 2826 - DNA, 20 bp, artificial
  human GFAT antisense
ctccttacagtaacgaagac

SEQ ID NO: 2827 - DNA, 20 bp, artificial
  human GFAT antisense
ttccttaatcaaatcaggca

SEQ ID NO: 2828 - DNA, 20 bp, artificial
  human GFAT antisense
gagaatgccctgcaagcagt

SEQ ID NO: 2829 - DNA, 20 bp, artificial
  human GFAT antisense
cctcactctacagtcacaga

SEQ ID NO: 2830 - DNA, 20 bp, artificial
  human GFAT antisense
tgtctttgcctgttctgtag

SEQ ID NO: 2831 - DNA, 20 bp, artificial
  human GFAT antisense
ccatgctcagtacttcctta

SEQ ID NO: 2832 - DNA, 20 bp, artificial
  human GFAT antisense
tctgatacagattccaatat

SEQ ID NO: 2833 - DNA, 20 bp, artificial
  human GFAT antisense
ccagaaatgcaacacccagc

SEQ ID NO: 2834 - DNA, 20 bp, artificial
  human GFAT antisense
aaacagaaacaaatttcaaa

SEQ ID NO: 2835 - DNA, 20 bp, artificial
  human GFAT antisense
taaaatatgtcattcagcag

SEQ ID NO: 2836 - DNA, 20 bp, artificial
  human GFAT antisense
gcaggcattggcttcccaat

SEQ ID NO: 2837 - DNA, 20 bp, artificial
  human GFAT antisense
tgctgcaacatcatcatctt

SEQ ID NO: 2838 - DNA, 20 bp, artificial
  human GFAT antisense
aattcgatggatagaaagac

SEQ ID NO: 2839 - DNA, 20 bp, artificial
  human GFAT antisense
agcaaacatcatctcgaaag

SEQ ID NO: 2840 - DNA, 20 bp, artificial
  human GFAT antisense
agacccatcaaagtatctgc

SEQ ID NO: 2841 - DNA, 20 bp, artificial
  human GFAT antisense
atctgtctcccgtgatatgg

SEQ ID NO: 2842 - DNA, 20 bp, artificial
  human GFAT antisense
agtccactgagtggggcacc

SEQ ID NO: 2843 - DNA, 20 bp, artificial
  human GFAT antisense
aaaacaaaacagaaacaaat

SEQ ID NO: 2844 - DNA, 20 bp, artificial
  human GFAT antisense
gctctgtgttgtgattttaa

SEQ ID NO: 2845 - DNA, 20 bp, artificial
  human GFAT antisense
attggcttcccaatctttat

SEQ ID NO: 2846 - DNA, 20 bp, artificial
  human GFAT antisense
attctatatccaaatccata

SEQ ID NO: 2847 - DNA, 20 bp, artificial
  human GFAT antisense
aaattctatatccaaatcca

SEQ ID NO: 2848 - DNA, 20 bp, artificial
  human GFAT antisense
tcactccgtacaccaatcaa

SEQ ID NO: 2849 - DNA, 20 bp, artificial
  human GFAT antisense
gtctttgcctgttctgtaga

SEQ ID NO: 2850 - DNA, 20 bp, artificial
  human GFAT antisense
taaagctcctctctccttac

SEQ ID NO: 2851 - DNA, 20 bp, artificial
  human GFAT antisense
cacgctgagaatgccctgca

SEQ ID NO: 2852 - DNA, 20 bp, artificial
  human GFAT antisense
aaggattgagacccaccaat

SEQ ID NO: 2853 - DNA, 20 bp, artificial
  human GFAT antisense
gcaaatatgttaaggattga

SEQ ID NO: 2854 - DNA, 20 bp, artificial
  human GFAT antisense
atttaaaaaataaaagacta

SEQ ID NO: 2855 - DNA, 20 bp, artificial
  human GFAT antisense
aagaacaagataaaatatgt

SEQ ID NO: 2856 - DNA, 20 bp, artificial
  human GFAT antisense
ttggcttcccaatctttatc

SEQ ID NO: 2857 - DNA, 20 bp, artificial
  human GFAT antisense
aagctgggttttgcaggcat

SEQ ID NO: 2858 - DNA, 20 bp, artificial
  human GFAT antisense
tatatccaaatccatatctt

SEQ ID NO: 2859 - DNA, 20 bp, artificial
  human GFAT antisense
tgtctcacctgattgactaa

SEQ ID NO: 2860 - DNA, 20 bp, artificial
  human GFAT antisense
accaaagccagagggccatg

SEQ ID NO: 2861 - DNA, 20 bp, artificial
  human GFAT antisense
agcaaggtggaaagccagca

SEQ ID NO: 2862 - DNA, 20 bp, artificial
  human GFAT antisense
gtatagatattcctcactct

SEQ ID NO: 2863 - DNA, 20 bp, artificial
  human GFAT antisense
taaccaaacttagatataaa

SEQ ID NO: 2864 - DNA, 20 bp, artificial
  human GFAT antisense
ctgctgcaacatcatcatct

SEQ ID NO: 2865 - DNA, 20 bp, artificial
  human GFAT antisense
gctgtctcacctgattgact

SEQ ID NO: 2866 - DNA, 20 bp, artificial
  human GFAT antisense
cacagttaaagctcctctct

SEQ ID NO: 2867 - DNA, 20 bp, artificial
  human GFAT antisense
gaaatgcaacacccagcatt

SEQ ID NO: 2868 - DNA, 20 bp, artificial
  human GFAT antisense
ctaaccaaacttagatataa

SEQ ID NO: 2869 - DNA, 20 bp, artificial
  human GFAT antisense
gataaaatatgtcattcagc

SEQ ID NO: 2870 - DNA, 20 bp, artificial
  human GFAT antisense
atatggaactgccaactgtg

SEQ ID NO: 2871 - DNA, 20 bp, artificial
  human GFAT antisense
gatacaaactggctggtata

SEQ ID NO: 2872 - DNA, 20 bp, artificial
  human GFAT antisense
gggccatgtttcaattcacc

SEQ ID NO: 2873 - DNA, 20 bp, artificial
  human GFAT antisense
ttggcaaacccttccctaac

SEQ ID NO: 2874 - DNA, 20 bp, artificial
  human GFAT antisense
aaaacagaaacaaatttcaa

SEQ ID NO: 2875 - DNA, 20 bp, artificial
  human GFAT antisense
tctgtagagtataggaatgt

SEQ ID NO: 2876 - DNA, 20 bp, artificial
  human GFAT antisense
ctgtctcacctgattgacta

SEQ ID NO: 2877 - DNA, 20 bp, artificial
  human GFAT antisense
cttaatcaaatcaggcagcc

SEQ ID NO: 2878 - DNA, 20 bp, artificial
  human GFAT antisense
tgctcagtacttccttaatc

SEQ ID NO: 2879 - DNA, 20 bp, artificial
  human GFAT antisense
tctgagaaactaaggctaac

SEQ ID NO: 2880 - DNA, 20 bp, artificial
  human GFAT antisense
ttgagacccaccaatgcact

SEQ ID NO: 2881 - DNA, 20 bp, artificial
  human GFAT antisense
caaatatgttaaggattgag

SEQ ID NO: 2882 - DNA, 20 bp, artificial
  human GFAT antisense
agctgggttttgcaggcatt

SEQ ID NO: 2883 - DNA, 20 bp, artificial
  human GFAT antisense
tctttgcctgttctgtagag

SEQ ID NO: 2884 - DNA, 20 bp, artificial
  human GFAT antisense
taattcgatggatagaaaga

SEQ ID NO: 2885 - DNA, 20 bp, artificial
  human GFAT antisense
accagcatggtaacttgttc

SEQ ID NO: 2886 - DNA, 20 bp, artificial
  human GFAT antisense
aagcaaacatcatctcgaaa

SEQ ID NO: 2887 - DNA, 20 bp, artificial
  human GFAT antisense
cacctacagataatagacaa

SEQ ID NO: 2888 - DNA, 20 bp, artificial
  human GFAT antisense
ccagcatggtaacttgttcc

SEQ ID NO: 2889 - DNA, 20 bp, artificial
  human GFAT antisense
gaaagactggtgtgtttctg

SEQ ID NO: 2890 - DNA, 20 bp, artificial
  human GFAT antisense
aatgccctgcaagcagtcca

SEQ ID NO: 2891 - DNA, 20 bp, artificial
  human GFAT antisense
aaactaaggctaaccaaact

SEQ ID NO: 2892 - DNA, 20 bp, artificial
  human GFAT antisense
ctgagaaactaaggctaacc

SEQ ID NO: 2893 - DNA, 20 bp, artificial
  human GFAT antisense
agtacttccttaatcaaatc

SEQ ID NO: 2894 - DNA, 20 bp, artificial
  human GFAT antisense
atgccctgcaagcagtccac

SEQ ID NO: 2895 - DNA, 20 bp, artificial
  human GFAT antisense
gctgagaatgccctgcaagc

SEQ ID NO: 2896 - DNA, 20 bp, artificial
  human GFAT antisense
ctgatacagattccaatata

SEQ ID NO: 2897 - DNA, 20 bp, artificial
  human GFAT antisense
agcattctttaaagaaaata

SEQ ID NO: 2898 - DNA, 20 bp, artificial
  human GFAT antisense
acagaaacaaatttcaaaat

SEQ ID NO: 2899 - DNA, 20 bp, artificial
  human GFAT antisense
ctgtagagtataggaatgtg

SEQ ID NO: 2900 - DNA, 20 bp, artificial
  human GFAT antisense
aaatcaacatcatagcctct

SEQ ID NO: 2901 - DNA, 20 bp, artificial
  human GFAT antisense
cagcattctttaaagaaaat

SEQ ID NO: 2902 - DNA, 20 bp, artificial
  human GFAT antisense
tttaattcgatggatagaaa

SEQ ID NO: 2903 - DNA, 20 bp, artificial
  human GFAT antisense
cgtttaattcgatggataga

SEQ ID NO: 2904 - DNA, 20 bp, artificial
  human GFAT antisense
aacatcacaagggatacaaa

SEQ ID NO: 2905 - DNA, 20 bp, artificial
  human GFAT antisense
agaatgccctgcaagcagtc

SEQ ID NO: 2906 - DNA, 20 bp, artificial
  human GFAT antisense
acccagcattctttaaagaa

SEQ ID NO: 2907 - DNA, 20 bp, artificial
  human GFAT antisense
cagaaacaaatttcaaaata

SEQ ID NO: 2908 - DNA, 20 bp, artificial
  human GFAT antisense
aaaaacaaaacagaaacaaa

SEQ ID NO: 2909 - DNA, 20 bp, artificial
  human GFAT antisense
ttaattcgatggatagaaag

SEQ ID NO: 2910 - DNA, 20 bp, artificial
  human GFAT antisense
agctcctcaagaacttgacg

SEQ ID NO: 2911 - DNA, 20 bp, artificial
  human GFAT antisense
tcacctgattgactaaggaa

SEQ ID NO: 2912 - DNA, 20 bp, artificial
  human GFAT antisense
gtctcacctgattgactaag

SEQ ID NO: 2913 - DNA, 20 bp, artificial
  human GFAT antisense
tctgtctcccgtgatatgga

SEQ ID NO: 2914 - DNA, 20 bp, artificial
  human GFAT antisense
cagaaatgcaacacccagca

SEQ ID NO: 2915 - DNA, 20 bp, artificial
  human GFAT antisense
aacagaaacaaatttcaaaa

SEQ ID NO: 2916 - DNA, 20 bp, artificial
  human GFAT antisense
gttcactccgtacaccaatc

SEQ ID NO: 2917 - DNA, 20 bp, artificial
  human GFAT antisense
cagtagaaagtttatgttca

SEQ ID NO: 2918 - DNA, 20 bp, artificial
  human GFAT antisense
gtttaattcgatggatagaa

SEQ ID NO: 2919 - DNA, 20 bp, artificial
  human GFAT antisense
ttgctacaccagcatggtaa

SEQ ID NO: 2920 - DNA, 20 bp, artificial
  human GFAT antisense
aagcagtccactgagtgggg

SEQ ID NO: 2921 - DNA, 20 bp, artificial
  human GFAT antisense
actctacagtcacagatttg

SEQ ID NO: 2922 - DNA, 20 bp, artificial
  human GFAT antisense
atagatattcctcactctac

SEQ ID NO: 2923 - DNA, 20 bp, artificial
  human GFAT antisense
tgggttttgcaggcattggc

SEQ ID NO: 2924 - DNA, 20 bp, artificial
  human GFAT antisense
aaagcaaacatcatctcgaa

SEQ ID NO: 2925 - DNA, 20 bp, artificial
  human GFAT antisense
ctgtctcccgtgatatggaa

SEQ ID NO: 2926 - DNA, 20 bp, artificial
  human GFAT antisense
agggccatgtttcaattcac

SEQ ID NO: 2927 - DNA, 20 bp, artificial
  human GFAT antisense
ctctacagtcacagatttgg

SEQ ID NO: 2928 - DNA, 20 bp, artificial
  human GFAT antisense
tatagatattcctcactcta

SEQ ID NO: 2929 - DNA, 20 bp, artificial
  human GFAT antisense
ccatcttcaaatttaaaatc

SEQ ID NO: 2930 - DNA, 20 bp, artificial
  human GFAT antisense
ctatatccaaatccatatct

SEQ ID NO: 2931 - DNA, 20 bp, artificial
  human GFAT antisense
actgctgcaacatcatcatc

SEQ ID NO: 2932 - DNA, 20 bp, artificial
  human GFAT antisense
catcacaagggatacaaact

SEQ ID NO: 2933 - DNA, 20 bp, artificial
  human GFAT antisense
acatcacaagggatacaaac

SEQ ID NO: 2934 - DNA, 20 bp, artificial
  human GFAT antisense
tgagaaactaaggctaacca

SEQ ID NO: 2935 - DNA, 20 bp, artificial
  human GFAT antisense
tagatattcctcactctaca

SEQ ID NO: 2936 - DNA, 20 bp, artificial
  human GFAT antisense
tacagattccaatatagatt

SEQ ID NO: 2937 - DNA, 20 bp, artificial
  human GFAT antisense
agaaatgcaacacccagcat

SEQ ID NO: 2938 - DNA, 20 bp, artificial
  human GFAT antisense
ttctatatccaaatccatat

SEQ ID NO: 2939 - DNA, 20 bp, artificial
  human GFAT antisense
gtagagtataggaatgtgat

SEQ ID NO: 2940 - DNA, 20 bp, artificial
  human GFAT antisense
acgctgagaatgccctgcaa

SEQ ID NO: 2941 - DNA, 20 bp, artificial
  human GFAT antisense
tgagacccaccaatgcacta

SEQ ID NO: 2942 - DNA, 20 bp, artificial
  human GFAT antisense
aggattgagacccaccaatg

SEQ ID NO: 2943 - DNA, 20 bp, artificial
  human GFAT antisense
agagtataggaatgtgatca

SEQ ID NO: 2944 - DNA, 20 bp, artificial
  human GFAT antisense
cctgttctgtagagtatagg

SEQ ID NO: 2945 - DNA, 20 bp, artificial
  human GFAT antisense
cacctgattgactaaggaaa

SEQ ID NO: 2946 - DNA, 20 bp, artificial
  human GFAT antisense
ggatacaaactggctggtat

SEQ ID NO: 2947 - DNA, 20 bp, artificial
  human GFAT antisense
caagcagtccactgagtggg

SEQ ID NO: 2948 - DNA, 20 bp, artificial
  human GFAT antisense
gggaaatcaacatcatagcc

SEQ ID NO: 2949 - DNA, 20 bp, artificial
  human GFAT antisense
tgcaaatatgttaaggattg

SEQ ID NO: 2950 - DNA, 20 bp, artificial
  human GFAT antisense
agataaaatatgtcattcag

SEQ ID NO: 2951 - DNA, 20 bp, artificial
  human GFAT antisense
tcagtagaaagtttatgttc

SEQ ID NO: 2952 - DNA, 20 bp, artificial
  human GFAT antisense
ttcgtttaattcgatggata

SEQ ID NO: 2953 - DNA, 20 bp, artificial
  human GFAT antisense
taaaaaataaaagactacag

SEQ ID NO: 2954 - DNA, 20 bp, artificial
  human GFAT antisense
agtagaaagtttatgttcac

SEQ ID NO: 2955 - DNA, 20 bp, artificial
  human GFAT antisense
acatcaaattctatatccaa

SEQ ID NO: 2956 - DNA, 20 bp, artificial
  human GFAT antisense
catcatctcgaaagactggt

SEQ ID NO: 2957 - DNA, 20 bp, artificial
  human GFAT antisense
cagttaaagctcctctctcc

SEQ ID NO: 2958 - DNA, 20 bp, artificial
  human GFAT antisense
cactccgtacaccaatcaac

SEQ ID NO: 2959 - DNA, 20 bp, artificial
  human GFAT antisense
aacatcatctcgaaagactg

SEQ ID NO: 2960 - DNA, 20 bp, artificial
  human GFAT antisense
aatttcaaaataaatcacat

SEQ ID NO: 2961 - DNA, 20 bp, artificial
  human GFAT antisense
caaattctatatccaaatcc

SEQ ID NO: 2962 - DNA, 20 bp, artificial
  human GFAT antisense
ctcaagaacttgacgtgttg

SEQ ID NO: 2963 - DNA, 20 bp, artificial
  human GFAT antisense
catgctcagtacttccttaa

SEQ ID NO: 2964 - DNA, 20 bp, artificial
  human GFAT antisense
atgctcagtacttccttaat

SEQ ID NO: 2965 - DNA, 20 bp, artificial
  human GFAT antisense
cacttgctgaagagcattct

SEQ ID NO: 2966 - DNA, 20 bp, artificial
  human GFAT antisense
cactgagtggggcaccttga

SEQ ID NO: 2967 - DNA, 20 bp, artificial
  human GFAT antisense
gctgggttttgcaggcattg

SEQ ID NO: 2968 - DNA, 20 bp, artificial
  human GFAT antisense
caaactggctggtataagcc

SEQ ID NO: 2969 - DNA, 20 bp, artificial
  human GFAT antisense
ccagcattctttaaagaaaa

SEQ ID NO: 2970 - DNA, 20 bp, artificial
  human GFAT antisense
gagaaactaaggctaaccaa

SEQ ID NO: 2971 - DNA, 20 bp, artificial
  human GFAT antisense
gcattggcttcccaatcttt

SEQ ID NO: 2972 - DNA, 20 bp, artificial
  human GFAT antisense
tagagtataggaatgtgatc

SEQ ID NO: 2973 - DNA, 20 bp, artificial
  human GFAT antisense
tgtagagtataggaatgtga

SEQ ID NO: 2974 - DNA, 20 bp, artificial
  human GFAT antisense
cttgctgaagagcattctga

SEQ ID NO: 2975 - DNA, 20 bp, artificial
  human GFAT antisense
attgagacccaccaatgcac

SEQ ID NO: 2976 - DNA, 20 bp, artificial
  human GFAT antisense
catcaaattctatatccaaa

SEQ ID NO: 2977 - DNA, 20 bp, artificial
  human GFAT antisense
agcaaccacttgctgaagag

SEQ ID NO: 2978 - DNA, 20 bp, artificial
  human GFAT antisense
tctacagtcacagatttggc

SEQ ID NO: 2979 - DNA, 20 bp, artificial
  human GFAT antisense
ttctgtagagtataggaatg

SEQ ID NO: 2980 - DNA, 20 bp, artificial
  human GFAT antisense
tgctacaccagcatggtaac

SEQ ID NO: 2981 - DNA, 20 bp, artificial
  human GFAT antisense
acaagggatacaaactggct

SEQ ID NO: 2982 - DNA, 20 bp, artificial
  human GFAT antisense
ctgagaatgccctgcaagca

SEQ ID NO: 2983 - DNA, 20 bp, artificial
  human GFAT antisense
atttcaaaataaatcacatc

SEQ ID NO: 2984 - DNA, 20 bp, artificial
  human GFAT antisense
gaaactaaggctaaccaaac

SEQ ID NO: 2985 - DNA, 20 bp, artificial
  human GFAT antisense
cattggcttcccaatcttta

SEQ ID NO: 2986 - DNA, 20 bp, artificial
  human GFAT antisense
ggcattggcttcccaatctt

SEQ ID NO: 2987 - DNA, 20 bp, artificial
  human GFAT antisense
acttgctgaagagcattctg

SEQ ID NO: 2988 - DNA, 20 bp, artificial
  human GFAT antisense
tgttcactccgtacaccaat

SEQ ID NO: 2989 - DNA, 20 bp, artificial
  human GFAT antisense
ccttaatcaaatcaggcagc

SEQ ID NO: 2990 - DNA, 20 bp, artificial
  human GFAT antisense
aggcattggcttcccaatct

SEQ ID NO: 2991 - DNA, 20 bp, artificial
  human GFAT antisense
atacagattccaatatagat

SEQ ID NO: 2992 - DNA, 20 bp, artificial
  human GFAT antisense
atcacaagggatacaaactg

SEQ ID NO: 2993 - DNA, 20 bp, artificial
  human GFAT antisense
acctgattgactaaggaaaa

SEQ ID NO: 2994 - DNA, 20 bp, artificial
  human GFAT antisense
tgagaatgccctgcaagcag

SEQ ID NO: 2995 - DNA, 20 bp, artificial
  human GFAT antisense
tcaagaacttgacgtgttgc

SEQ ID NO: 2996 - DNA, 20 bp, artificial
  human GFAT antisense
tttcttcttaataagctggg

SEQ ID NO: 2997 - DNA, 20 bp, artificial
  human GFAT antisense
atcaaattctatatccaaat

SEQ ID NO: 2998 - DNA, 20 bp, artificial
  human GFAT antisense
gttctgtagagtataggaat

SEQ ID NO: 2999 - DNA, 20 bp, artificial
  human GFAT antisense
tgatacagattccaatatag

SEQ ID NO: 3000 - DNA, 20 bp, artificial
  human GFAT antisense
caaccacttgctgaagagca

SEQ ID NO: 3001 - DNA, 20 bp, artificial
  human GFAT antisense
cgctgagaatgccctgcaag

SEQ ID NO: 3002 - DNA, 20 bp, artificial
  human GFAT antisense
agaaactaaggctaaccaaa

SEQ ID NO: 3003 - DNA, 20 bp, artificial
  human GFAT antisense
tcaaattctatatccaaatc

SEQ ID NO: 3004 - DNA, 20 bp, artificial
  human GFAT antisense
gaaaaagcaaacatcatctc

SEQ ID NO: 3005 - DNA, 20 bp, artificial
  human GFAT antisense
tctcacctgattgactaagg

SEQ ID NO: 3006 - DNA, 20 bp, artificial
  human GFAT antisense
gatatggaactgccaactgt

SEQ ID NO: 3007 - DNA, 20 bp, artificial
  human GFAT antisense
tgtctcccgtgatatggaac

SEQ ID NO: 3008 - DNA, 20 bp, artificial
  human GFAT antisense
gtacttccttaatcaaatca

SEQ ID NO: 3009 - DNA, 20 bp, artificial
  human GFAT antisense
ccaccaaagccagagggcca

SEQ ID NO: 3010 - DNA, 20 bp, artificial
  human GFAT antisense
aaaaagcaaacatcatctcg

SEQ ID NO: 3011 - DNA, 20 bp, artificial
  human GFAT antisense
aatagacaacaagtctgaga

SEQ ID NO: 3012 - DNA, 20 bp, artificial
  human GFAT antisense
attttaaagaacaagataaa

SEQ ID NO: 3013 - DNA, 20 bp, artificial
  human GFAT antisense
acagcacttgcatcagaagc

SEQ ID NO: 3014 - DNA, 20 bp, artificial
  human GFAT antisense
tttaaagaacaagataaaat

SEQ ID NO: 3015 - DNA, 20 bp, artificial
  human GFAT antisense
ttttaaagaacaagataaaa

SEQ ID NO: 3016 - DNA, 20 bp, artificial
  human GFAT antisense
acagttaaagctcctctctc

SEQ ID NO: 3017 - DNA, 20 bp, artificial
  human GFAT antisense
caccaaagccagagggccat

SEQ ID NO: 3018 - DNA, 20 bp, artificial
  human GFAT antisense
gaatgccctgcaagcagtcc

SEQ ID NO: 3019 - DNA, 20 bp, artificial
  human GFAT antisense
gattttaaagaacaagataa

SEQ ID NO: 3020 - DNA, 20 bp, artificial
  human GFAT antisense
aaaagcaaacatcatctcga

SEQ ID NO: 3021 - DNA, 20 bp, artificial
  human GFAT antisense
aagggatacaaactggctgg

SEQ ID NO: 3022 - DNA, 20 bp, artificial
  human GFAT antisense
tcacaagggatacaaactgg

SEQ ID NO: 3023 - DNA, 20 bp, artificial
  human GFAT antisense
gcaaccacttgctgaagagc

SEQ ID NO: 3024 - DNA, 20 bp, artificial
  human GFAT antisense
ccacttgctgaagagcattc

SEQ ID NO: 3025 - DNA, 20 bp, artificial
  human GFAT antisense
gctaaccaaacttagatata

SEQ ID NO: 3026 - DNA, 20 bp, artificial
  human GFAT antisense
tgatatggaactgccaactg

SEQ ID NO: 3027 - DNA, 20 bp, artificial
  human GFAT antisense
cacaagggatacaaactggc

SEQ ID NO: 3028 - DNA, 20 bp, artificial
  human GFAT antisense
caagggatacaaactggctg

SEQ ID NO: 3029 - DNA, 20 bp, artificial
  human GFAT antisense
caggcattggcttcccaatc

SEQ ID NO: 3030 - DNA, 20 bp, artificial
  human GFAT antisense
ctgggttttgcaggcattgg

SEQ ID NO: 3031 - DNA, 20 bp, artificial
  human GFAT antisense
ttcctcactctacagtcaca

SEQ ID NO: 3032 - DNA, 20 bp, artificial
  human GFAT antisense
tacttccttaatcaaatcag

SEQ ID NO: 3033 - DNA, 20 bp, artificial
  human GFAT antisense
ttaaagaacaagataaaata

SEQ ID NO: 3034 - DNA, 20 bp, artificial
  human GFAT antisense
ggctaaccaaacttagatat

SEQ ID NO: 3035 - DNA, 20 bp, artificial
  human GFAT antisense
cccagcattctttaaagaaa

SEQ ID NO: 3036 - DNA, 20 bp, artificial
  human GFAT antisense
tccttaatcaaatcaggcag

SEQ ID NO: 3037 - DNA, 20 bp, artificial
  human GFAT antisense
ctcacctgattgactaagga

SEQ ID NO: 3038 - DNA, 20 bp, artificial
  human GFAT antisense
aaccacttgctgaagagcat

SEQ ID NO: 3039 - DNA, 20 bp, artificial
  human GFAT antisense
taaagaacaagataaaatat

SEQ ID NO: 3040 - DNA, 20 bp, artificial
  human GFAT antisense
aaacatcatctcgaaagact

SEQ ID NO: 3041 - DNA, 20 bp, artificial
  human GFAT antisense
acttccttaatcaaatcagg

SEQ ID NO: 3042 - DNA, 20 bp, artificial
  human GFAT antisense
tcgtttaattcgatggatag

SEQ ID NO: 3043 - DNA, 20 bp, artificial
  human GFAT antisense
tcctcactctacagtcacag

SEQ ID NO: 3044 - DNA, 20 bp, artificial
  human GFAT antisense
gcaaacatcatctcgaaaga

SEQ ID NO: 3045 - DNA, 20 bp, artificial
  human GFAT antisense
ggaaaaagcaaacatcatct

SEQ ID NO: 3046 - DNA, 20 bp, artificial
  human GFAT antisense
accacttgctgaagagcatt

SEQ ID NO: 3047 - DNA, 20 bp, artificial
  human GFAT antisense
attgactaaggaaaaagcaa

SEQ ID NO: 3048 - DNA, 20 bp, artificial
  human GFAT antisense
aaggaaaaagcaaacatcat

SEQ ID NO: 3049 - DNA, 20 bp, artificial
  human GFAT antisense
ttgactaaggaaaaagcaaa

SEQ ID NO: 3050 - DNA, 20 bp, artificial
  human GFAT antisense
aggaaaaagcaaacatcatc

SEQ ID NO: 3051 - DNA, 20 bp, artificial
  human GFAT antisense
aaagaacaagataaaatatg

SEQ ID NO: 3052 - DNA, 20 bp, artificial
  human GFAT antisense
taaggaaaaagcaaacatca

SEQ ID NO: 3053 - DNA, 20 bp, artificial
  human GFAT antisense
caaacatcatctcgaaagac

SEQ ID NO: 3054 - DNA, 20 bp, artificial
  human GFAT antisense
tgactaaggaaaaagcaaac

SEQ ID NO: 3055 - DNA, 20 bp, artificial
  human GFAT antisense
gactaaggaaaaagcaaaca

SEQ ID NO: 3056 - DNA, 20 bp, artificial
  human GFAT antisense
ctgttctgtagagtatagga

SEQ ID NO: 3057 - DNA, 20 bp, artificial
  human GFAT antisense
ctgattgactaaggaaaaag

SEQ ID NO: 3058 - DNA, 20 bp, artificial
  human GFAT antisense
tgttctgtagagtataggaa

SEQ ID NO: 3059 - DNA, 20 bp, artificial
  human GFAT antisense
cctgattgactaaggaaaaa

SEQ ID NO: 3060 - DNA, 20 bp, artificial
  human GFAT antisense
actaaggaaaaagcaaacat

SEQ ID NO: 3061 - DNA, 20 bp, artificial
  human GFAT antisense
gattgactaaggaaaaagca

SEQ ID NO: 3062 - DNA, 20 bp, artificial
  human GFAT antisense
tgattgactaaggaaaaagc

SEQ ID NO: 3063 - DNA, 20 bp, artificial
  human GFAT antisense
ctaaggaaaaagcaaacatc

SEQ ID NO: 3064 - DNA, 23 bp, Artificial
  human GFAT forward primer
atgcaagaaagacgcaaagagat

SEQ ID NO: 3065 - DNA, 24 bp, Artificial
  human GFAT reverse primer
ttcgtcatccatgctcagtacttc

SEQ ID NO: 3066 - DNA, 25 bp, Artificial
  human GFAT PCR primer
atgcttggattgaaacggctgcctg

SEQ ID NO: 3067 - DNA, 20 bp, Artificial
  human cyclophilin forward primer
cccaccgtgttcttcgacat

SEQ ID NO: 3068 - DNA, 22 bp, Artificial
  human cyclophilin reverse primer
tttctgctgtctttgggacctt

SEQ ID NO: 3069 - DNA, 24 bp, Artificial
  human cyclophilin PCR primer
cgcgtctcctttgagctgtttgca

SEQ ID NO: 3070 - DNA, 3082 bp, Homo sapiens
agggagtcgtgtcggcgccaccccggcccccgagcccgcagattgcccaccgaagctcgtgtgtgcacccccgatcccgccagccactcgcccctggcctcgcgggccgtgtctccggcatcatgtgtggtatatttgcttacttaaactaccatgttcctcgaacgagacgagaaatcctggagaccctaatcaaaggccttcagagactggagtacagaggatatgattctgctggtgtgggatttgatggaggcaatgataaagattgggaagccaatgcctgcaaaacccagcttattaagaagaaaggaaaagttaaggcactggatgaagaagttcacaagcaacaagatatggatttggatatagaatttgatgtacaccttggaatagctcatacccgttgggcaacacatggagaacccagtcctgtcaatagccacccccagcgctctgataaaaataatgaatttatcgttattcacaatggaatcatcaccaactacaaagacttgaaaaagtttttggaaagcaaaggctatgacttcgaatctgaaacagacacagagacaattgccaagctcgttaagtatatgtatgacaatcgggaaagtcaagataccagctttactaccttggtggagagagttatccaacaattggaaggtgcttttgcacttgtgtttaaaagtgttcattttcccgggcaagcagttggcacaaggcgaggtagccctctgttgattggtgtacggagtgaacataaactttctactgatcacattcctatactctacagaacaggcaaagacaagaaaggaagctgcaatctctctcgtgtggacagcacaacctgccttttcccggtggaagaaaaagcagtggagtattactttgcttctgatgcaagtgctgtcatagaacacaccaatcgcgtcatctttctggaagatgatgatgttgcagcagtagtggatggacgtctttctatccatcgaattaaacgaactgcaggagatcaccccggacgagctgtgcaaacactccagatggaactccagcagatcatgaagggcaacttcagttcatttatgcagaaggaaatatttgagcagccagagtctgtcgtgaacacaatgagaggaagagtcaactttgatgactatactgtgaatttgggtggtttgaaggatcacataaaggagatccagagatgccggcgtttgattcttattgcttgtggaacaagttaccatgctggtgtagcaacacgtcaagttcttgaggagctgactgagttgcctgtgatggtggaactagcaagtgacttcctggacagaaacacaccagtctttcgagatgatgtttgctttttccttagtcaatcaggtgagacagcagatactttgatgggtcttcgttactgtaaggagagaggagctttaactgtggggatcacaaacacagttggcagttccatatcacgggagacagattgtggagttcatattaatgctggtcctgagattggtgtggccagtacaaaggcttataccagccagtttgtatcccttgtgatgtttgcccttatgatgtgtgatgatcggatctccatgcaagaaagacgcaaagagatcatgcttggattgaaacggctgcctgatttgattaaggaagtactgagcatggatgacgaaattcagaaactagcaacagaactttatcatcagaagtcagttctgataatgggacgaggctatcattatgctacttgtcttgaaggggcactgaaaatcaaagaaattacttatatgcactctgaaggcatccttgctggtgaattgaaacatggccctctggctttggtggataaattgatgcctgtgatcatgatcatcatgagagatcacacttatgccaagtgtcagaatgctcttcagcaagtggttgctcggcaggggcggcctgtggtaatttgtgataaggaggatactgagaccattaagaacacaaaaagaacgatcaaggtgccccactcagtggactgcttgcagggcattctcagcgtgatccctttacagttgctggctttccaccttgctgtgctgagaggctatgatgttgatttcccacggaatcttgccaaatctgtgactgtagagtgaggaatatctatacaaaatgtacgaaactgtatgattaagcaacacaagacaccttttgtatttaaaaccttgatttaaaatatcaccccttgaagcctttttttagtaaatccttatttatatatcagttataattattccactcaatatgtgatttttgtgaagttacctcttacattttcccagtaatttgtggaggactttgaataatggaatctatattggaatctgtatcagaaagattctagctattattttctttaaagaatgctgggtgttgcatttctggaccctccacttcaatctgagaagacaatatgtttctaaaaattggtacttgtttcaccatacttcattcagaccagtgaaagagtagtgcatttaattggagtatctaaagccagtggcagtgtatgctcatacttggacagttagggaagggtttgccaagttttaagagaagatgtgatttattttgaaatttgtttctgttttgtttttaaatcaaactgtaaaacttaaaactgaaaaattttattggtaggatttatatctaagtttggttagccttagtttctcagacttgttgtctattatctgtaggtggaagaaatttaggaagcgaaatattacagtagtgcattggtgggtctcaatccttaacatatttgcacaattttatagcacaaactttaaattcaagctgctttggacaactgacaatatgattttaaatttgaagatgggatgtgtacatgttgggtatcctactactttgtgttttcatctcctaaaagtgttttttatttccttgtatctgtagtcttttattttttaaatgactgctgaatgacatattttatcttgttctttaaaatcacaacacagagctgctattaaattaatattgatat

SEQ ID NO: 3071 - protein, 681 aa, Homo sapiens
MCGIFAYLNYHVPRTRREILETLIKGLQRLEYRGYDSAGVGFDGGNDKDWEANACKTQLIKKKGKVKALDEEVHKQQDMDLDIEFDVHLGIAHTRWATHGEPSPVNSHPQRSDKNNEFIVIHNGIITNYKDLKKFLESKGYDFESETDTETIAKLVKYMYDNRESQDTSFTTLVERVIQQLEGAFALVFKSVHFPGQAVGTRRGSPLLIGVRSEHKLSTDHIPILYRTGKDKKGSCNLSRVDSTTCLFPVEEKAVEYYFASDASAVIEHTNRVIFLEDDDVAAVVDGRLSIHRIKRTAGDHPGRAVQTLQMELQQIMKGNFSSFMQKEIFEQPESVVNTMRGRVNFDDYTVNLGGLKDHIKEIQRCRRLILIACGTSYHAGVATRQVLEELTELPVMVELASDFLDRNTPVFRDDVCFFLSQSGETADTLMGLRYCKERGALTVGITNTVGSSISRETDCGVHINAGPEIGVASTKAYTSQFVSLVMFALMMCDDRISMQERRKEIMLGLKRLPDLIKEVLSMDDEIQKLATELYHQKSVLIMGRGYHYATCLEGALKIKEITYMHSEGILAGELKHGPLALVDKLMPVIMIIMRDHTYAKCQNALQQVVARQGRPVVICDKEDTETIKNTKRTIKVPHSVDCLQGILSVIPLQLLAFHLAVLRGYDVDFPRNLAKSVTVE
